(19) United States
(12) Patent Application Publication
(10) Pub. No.: US 2021/0130494 A1
(43) Pub. Date: May 6, 2021

(54) COMPOSITIONS AND METHODS FOR TREATMENT OF CANCER

(71) Applicant: Aleta Biotherapeutics Inc., Natick, MA (US)

(72) Inventors: Roy Lobb, Wellesley, MA (US); Paul Rennert, Holliston, MA (US)

(21) Appl. No.: 16/487,750

(22) PCT Filed: Feb. 22, 2018
(86) PCT No.: PCT/US18/19281

§ 371 Date: Aug. 21, 2019

Related U.S. Application Data
(60) Provisional application No. 62/541,439, filed on Aug. 4, 2017.
(60) Provisional application No. 62/462,098, filed on Feb. 22, 2017.

(51) Int. Cl. C07K 16/42; C07K 14/705; C07K 16/28; C07K 16/32

(52) U.S. Cl. CPC C07K 16/4241; C07K 14/70503; C07K 16/2863; C07K 2317/622; C07K 2319/33; C07K 2317/24; C07K 16/32

(57) ABSTRACT

Compositions, e.g., compositions comprising cellular therapeutics and/or protein therapeutics, and methods of using such compositions for treating cancer are described.

### CROSS REFERENCE TO RELATED APPLICATIONS

[0001] This application claims priority to each of U.S. Provisional Patent Application Nos. 62/462,098 filed Feb. 22, 2017; and 62/541,439 filed Aug. 4, 2017, the entire contents of each of which are hereby incorporated by reference.

### BACKGROUND

[0002] Adoptive cell therapy (ACT) is a treatment method in which cells are removed from a donor, cultured and/or manipulated in vitro, and then administered to a patient for the treatment of a disease. A variety of cell types have been used in ACT in an attempt to treat several classes of disorders. For the treatment of cancer, ACT generally involves the transfer of lymphocytes, such as chimeric antigen receptor (CAR) T cells. Use of such CAR T cells involves identifying an antigen on a tumor cell to which a CAR T cell can bind, but tumor heterogeneity can make antigen identification challenging. Accordingly, there remains a need for improved methods for treating cancer using adoptive cell therapy.

### SUMMARY

[0003] The present invention provides methods and compositions useful for treatment of cancer and/or for initiating or modulating immune responses. In some embodiments, the present invention provides cellular therapeutics (e.g., immune cells) comprising a constitutive expression construct, which comprises a promoter operably linked to a gene of interest. In some embodiments, the present invention provides cellular therapeutics (e.g., immune cells) comprising (i) an antigen binding receptor, wherein the antigen binding receptor comprises an antigen-binding domain, a transmembrane domain, and a cytosolic signaling domain, and (ii) an inducible expression construct, which comprises a promoter operably linked to a gene of interest. Among other things, the present invention encompasses the recognition that a combination of a cellular therapeutic described herein and one or more additional therapies (e.g., one or more additional cellular therapeutics (e.g., CAR-T cell, CAR-NK cell, TCR-T cell, TIL cell, allogenic NK cell, and autologous NK cell), antibody-drug conjugate, an antibody, and/or a polypeptide described herein), can lead to improved induction of beneficial immune responses, for example a cellular response (e.g., T-cell activation).

[0004] In some embodiments, the present disclosure provides methods of treating a subject having a tumor, comprising administering to the subject a cellular therapeutic described herein and/or a protein therapeutic described herein. In some embodiments, methods further comprise administration of one or more additional therapies (e.g., a second cellular therapeutic (e.g., CAR-T cell, CAR-NK cell, TCR-T cell, TIL cell, allogenic NK cell, and autologous NK cell), an antibody-drug conjugate, an antibody, and/or a polypeptide described herein).

[0005] Other features, objects, and advantages of the present invention are apparent in the detailed description that follows. It should be understood, however, that the detailed description, while indicating embodiments of the present invention, is given by way of illustration only, not limitation. Various changes and modifications within the scope of the invention will become apparent to those skilled in the art from the detailed description.

### BRIEF DESCRIPTION OF THE DRAWINGS

[0006] The figures of the drawing are for illustration purposes only, not for limitation.

[0007] FIG. 1 is a schematic depicting an exemplary cellular therapeutic.

[0008] FIG. 2 is a schematic depicting an exemplary cellular therapeutic encoding an inducible scFv-CD19 fusion protein.

[0009] FIG. 3 is a schematic depicting an exemplary cellular therapeutic encoding an inducible scFv-EGFR fusion protein.

[0010] FIG. 4 is a schematic depicting an exemplary “self amplifying” cellular therapeutic encoding an inducible scFv-CD19 fusion protein and an inducible CAR that targets CD19.

[0011] FIG. 5 is a schematic depicting an exemplary “self amplifying” cellular therapeutic encoding an inducible scFv-CD19 fusion protein and a constitutively expressed CAR that targets CD19.

[0012] FIG. 6 is a schematic depicting an exemplary “self amplifying” cellular therapeutic expressing an antigen binding receptor that does not include a signaling domain leading to induction of killing, and does include a signaling domain sufficient to induce gene transcription, and also encoding an inducible scFv-CD19 fusion protein and an inducible CAR (left) or a constitutively expressed CAR (right) that targets CD19.

[0013] FIG. 7 is a schematic depicting an exemplary cellular therapeutic encoding various inducible genes.

[0014] FIG. 8 is a schematic depicting an exemplary cellular therapeutic encoding an inducible cytokine.

[0015] FIG. 9 is a schematic depicting an exemplary cellular therapeutic encoding an inducible scFv-CD30 fusion protein.

[0016] FIG. 10 is a schematic depicting an exemplary cellular therapeutic encoding an inducible toxin.

[0017] FIG. 11 is a schematic depicting an exemplary cellular therapeutic encoding various inducible genes.

[0018] FIGS. 12A, 12B, and 12C are schematics depicting exemplary CD19 variants.

[0019] FIG. 13 is a schematic depicting exemplary antibody fusion proteins in which a polypeptide antigen is fused to the C terminus of a light chain (LC) of an antibody, a polypeptide antigen is fused to the N terminus of a LC of an antibody, a polypeptide antigen is fused to the C terminus of a heavy chain (HC) of an antibody, or a polypeptide antigen is fused to the N terminus of a HC of an antibody.

[0020] FIGS. 14A and 14B show expression levels of various polypeptide antigen-antibody fusion constructs.

[0021] FIG. 15 is a schematic depicting exemplary antibody fusion proteins in which a polypeptide antigen is fused in various orientations to an scFv.

[0022] FIG. 16 shows expression levels of various polypeptide antigen-scFv fusion constructs.

[0023] FIGS. 17A, 17B, 17C, and 17D show binding of panitumumab-CD19 fusion proteins to an anti-CD19 antibody (FMC63).

[0024] FIG. 18 shows binding of panitumumab-CD19 fusion proteins to an anti-CD19 antibody (FMC63) relative to negative controls.

[0025] FIGS. 19A, 19B, 19C, and 19D show binding of LY2875358-CD19 fusion proteins to an anti-CD19 antibody (FMC63).

[0026] FIG. 20 shows binding of LY2875358-CD19 fusion proteins to an anti-CD19 antibody (FMC63) relative to negative controls.

[0027] FIG. 21 shows a summary of expression of, and FMC63 binding to, various antibody-CD19 fusion proteins.

[0028] FIG. 22 shows binding of trastuzumab scFv-CD19 fusion proteins to an anti-CD19 antibody (FMC63).

[0029] FIGS. 23A, 23B, and 23C show binding of LY2875358-CD19 fusion proteins to c-Met expressing cells and to an anti-CD19 antibody (FMC63).

[0030] FIGS. 24A and 24B show binding of trastuzumab scFv-CD19 fusion proteins to an anti-CD19 antibody (FMC63) and to Her-2 protein.

[0031] FIGS. 25A and 25B show binding of trastuzumab scFv-CD19 fusion proteins to an anti-CD19 antibody (FMC63) relative to negative controls.

[0032] FIG. 26 shows binding of CD19-scFv fusion proteins captured on anti-His antibody-coated ELISA plates.

[0033] FIG. 27 shows binding of CD19-scFv fusion proteins captured on anti-His antibody-coated ELISA plates.

[0034] FIG. 28 shows binding of CD19-scFv fusion proteins captured on anti-FMC63 (anti-CD19)-coated plates, then detected with anti-His-HRP.

[0035] FIG. 29 shows detection of CD19-anti-Her2 trastuzumab scFv-human Fc fusion proteins in a “sandwich ELISA” format.

[0036] FIG. 30 shows the capture of multiple fusion proteins by anti-CD19 monoclonal antibody FMC63 and their detection by anti-His antibody coupled to HRP.

[0037] FIG. 31 shows the capture of CD19 full-length extracellular domain-anti-CD20 Leu16 scFv VH-VL-His fusion protein by the C-terminal His tag and then detected by mouse monoclonal antibody FMC63 anti-CD19 and then anti-mouse IgG-HRP.

[0038] FIG. 32 shows results for fusion proteins that incorporate CD22 protein domains, or anti-EGFRvIII scFv (#64: CD22-FMC63 scFv-His; #65: CD22-anti-CD20 scFv-His; #67: CD19 full ECD-anti-EGFRvIII scFv-his; #68: CD22-anti-EGFRvIII scFv-His).

[0039] FIG. 33 shows results for protein-antibody fusion proteins and protein-scFv fusion proteins derived from the same antibody, panitumumab (#57: Her2 extracellular domain-Panitumumab scFv VH-VL-His; #58 Her2 extracellular D4-Panitumumab scFv VH-VL-His; #33+4 (cotransfection of heavy and light chains; one chain carries the CD19 fusion): CD19 extracellular D1+2 Panitumumab antibody—His).

[0040] FIG. 34 shows binding affinity of purified CD19-anti-Her2 scFv-His fusion protein for the FMC63 antibody.

[0041] FIG. 35 shows the binding affinity of the FMC63-bound CD19-anti-Her2 scFv-His fusion protein to Her2.

[0042] FIG. 36 shows the binding affinity of the FMC63-bound CD19-anti-Her2 scFv-His fusion protein to anti-Her2 scFv.

[0043] FIG. 37 shows a flow cytometry profile of fusion protein CD19-ECD-Leu16 scFv (VH/VL)(#63) bound to CD20 expressing 293 cells and labeled with anti-CD19 monoclonal antibody FMC63-PE-conjugated.

[0044] FIG. 38 shows a flow cytometry profile of fusion protein CD19-D1+2-Leu16 scFv (VH/VL) (#83) bound to CD20 expressing 293 cells and labeled with anti-CD19 monoclonal antibody FMC63-PE-conjugated.

[0045] FIG. 39 shows a flow cytometry profile of fusion protein CD19-D1+2-Leu16 scFv (VL/VH) (#85) bound to CD20 expressing 293 cells and labeled with anti-CD19 monoclonal antibody FMC63-PE-conjugated.

[0046] FIG. 40 shows a flow cytometry profile of fusion protein CD19-D1+2-Leu16 scFv (VH/VL)-huIgGFc (#82) bound to CD20 expressing 293 cells+α-huIgG-FITC.

[0047] FIG. 41 shows analysis of anti-huIgG-FITC negative control: 293-CD20+α-huIgG-FITC.

[0048] FIG. 42 shows a flow cytometry profile of fusion protein CD19-D1+2-Leu16 scFv (VL/VH)-huIgGFc (#84) bound to CD20 expressing 293 cells+α-huIgG-FITC.

[0049] FIG. 43 shows a flow cytometry profile of fusion protein CD22-D123-Leu16 scFv (VH/VL) (#65) bound to CD20 expressing 293 cells+α-His-PE.

[0050] FIG. 44 shows detection control for Her2-A431 cells+Trastuzumab-PE, showing the background level of binding (A431 cells are Her2-negative).

[0051] FIG. 45 shows analysis of A431+fusion protein Her2-ECD-Panitumumab scFv (VH/VL) (#57)+Trastuzumab-PE-conjugated.

[0052] FIG. 46 shows analysis of A431+fusion protein Her2-D4-Panitumumab scFv (VH/VL) (#58) +Trastuzumab-PE-conjugated.

[0053] FIG. 47 shows IFNγ ELISA results for BT474 cells coated with indicated peptide and incubated with CD19 specific CAR-T at effector target ratio of 10:1.

[0054] FIG. 48 shows IFNγ ELISA results for BT474 cells coated with indicated peptide and incubated with CD19 specific CAR-T at effector target ratio of 1:1.

[0055] FIG. 49 shows summary XTT-cytotoxicity results for BT474 cells coated with indicated peptide and incubated with CD19 specific CAR-T at effector target ratio of 10:1.

[0056] FIG. 50 shows IFNγ ELISA results for BT474 cells coated with indicated peptide and incubated with CD19 specific CAR-T at effector target ratio of 10:1.

[0057] FIG. 51 shows IFNγ ELISA results for BT474 cells coated with indicated peptide and incubated with CD19 specific CAR-T at effector target ratio of 1:1.

[0058] FIGS. 52A-52C show exemplary Fc-based constructs.

[0059] FIGS. 53A-53C show exemplary Fc-based bi-specific constructs.

[0060] FIGS. 54A and 54B show exemplary Fc-based constructs that include an Fc Ig “swap”.

[0061] FIGS. 55A and 55B show exemplary constructs in which a loops in one or both Fc CH3 domains is replaced.

[0062] FIG. 56 shows an exemplary construct with fusion of a masking moiety to constructs described in FIGS. 52B and 52C with a masking moiety fused to the N-terminus of the scFv.

[0063] FIG. 57 shows an exemplary construct with fusion of a masking moiety to constructs described in FIGS. 53B and 53C with the masking moiety fused to the N-terminus of the VH and/or VL on the VH/VL arm.

[0064] FIG. 58 shows an exemplary construct with fusion of a masking moiety to construct described in FIG. 54B with a masking moiety fused to the N-terminus of each heavy chain.

[0065] FIG. 59 shows an exemplary construct with fusion of a masking moiety to constructs described in FIGS. 55A and 55B with a masking moiety fused to the N-terminus of a heavy chain and/or scFv VH.

[0066] FIGS. 60A-60D show analysis of GFP expression from the CMV promoter-tGFP construct (#66) under resting or activated conditions.

[0067] FIGS. 61A-61D show analysis of GFP expression from the human CD69 promoter-tGFP (#46) under resting or activated conditions.

[0068] FIGS. 62A-62D show analysis of GFP expression from the human TNFalpha promoter-tGFP (#47) under resting or activated conditions.

[0069] FIGS. 63A-63D show analysis of GFP expression from the human NFAT element×6 promoter-tGFP (#49) under resting or activated conditions.

[0070] FIGS. 64A-64B show analysis of expression of CD69 on the surface of cells under resting or activated conditions.

[0071] FIGS. 65A-65C depict binding of CD19-containing fusion proteins (#42, #43, #56, #82, #83, #91, #92, #93, #94) to an FMC63-coated plate. FIG. 65D shows titer determiniations for fusion proteins #82, #83, #91, and #92.

[0072] FIGS. 66A-66D show the capture of multiple fusion proteins by plate bound antigen and their detection by anti-His antibody coupled to HRP.

[0073] FIGS. 67A and 67B show flow cytometry results of fusion protein CD19-D1+2-Leu16 scFv (VH/VL) (#83) bound to CD20 expressing 293 cells and labeled with anti-His-PE (67A) or anti-CD19 monoclonal antibody FMC63-PE (67B).

[0074] FIGS. 68A and 68B show flow cytometry results of fusion protein CD19-D1+2-Leu16 scFv (VH/VL)-huIgGFc (#82) bound to CD20 expressing 293 cells and labeled with α-huIgG-FITC (68A) or FMC63-PE or anti-CD19 monoclonal antibody FMC63-PE (68B).

[0075] FIGS. 69A-69D show results of IFNγ ELISA for construct #83 fusion protein. FIG. 69A: 24 hrs, 10:1 effector:target ratio; FIG. 69B: 24 hrs, 2:1 effector:target ratio; FIG. 69C: 48 hrs, 10:1 effector:target ratio; FIG. 69D: 48 hrs, 2:1 effector:target ratio.

[0076] FIG. 70 show results of IFNγ ELISA for fusion protein derived from the cotransfection of construct #33+construct #4 at 24 hrs, 2:1 effector:target ratio.

[0077] FIGS. 71A and 71B show summary XTT-cytotoxicity results for fusion protein #83 and 293-CD20 cells. FIG. 71A: 48 hrs, 10:1 effector:target ratio; FIG. 71B 48 hrs, 2:1 effector:target ratio.

[0078] FIGS. 72A and 72B show summary XTT-cytotoxicity results for fusion protein derived from the cotransfection of construct #33+ construct #4 and A4321 cells. FIG. 72A: 24 hrs, 10:1 effector:target ratio. FIG. 72B: 24 hrs, 2:1 effector:target ratio.

[0079] FIGS. 73A and 73B show expression of HER2 and EGFR in transiently transfected 293T cells.

[0080] FIGS. 74A-74D show fusion protein #43 binding to 293T-Her2 expressing cells.

[0081] FIGS. 75A-75D show binding of fusion proteins #94, and #95 to 293T-Her2 expressing cells.

[0082] FIGS. 76A and 76B show binding of fusion protein #94 to 293T-EGFR expressing cells.

[0083] FIGS. 77A and 77B show CAR19-mediated cytotoxicity redirected to HER2+ cells by CAR19 T cell secretion of fusion protein encoded by construct #42.

[0084] FIG. 78 shows binding of a heteromeric fusion protein comprised of fusion proteins #29 and #103 to anti-CD19 antibody FMC63 detected by HRP-conjugated mouse IgG antibody.

[0085] FIGS. 79A and 79B shows yeast surface display of wild-type CD19 extracellular domain.

[0086] FIG. 80 shows antibody binding to yeast-displayed CD19 extracellular domain.

[0087] FIG. 81 shows diversified regions of the extracellular domain.

[0088] FIG. 82 demonstrates combinatorial CD19 libraries are effectively displayed on yeast surface and maintain antibody binding.

[0089] FIGS. 83A and 83B demonstrate combinatorial CD19 libraries can be enriched for binding ligands to EGFR and HER2.

[0090] FIG. 84A shows an exemplary Fc-based construct that includes an anti-tumor antigen scFv, an anti-idiotype scFv, and CH2 and CH3 Fc domains. FIG. 84B shows an exemplary Fc-based construct that includes an anti-tumor antigen scFv, an anti-idiotype scFv, and CH2 Fc domains. FIG. 84C shows an exemplary masked scFv/anti-idiotype scFv construct.

[0091] FIG. 85 demonstrates secretion of anti- FMC63 (anti-Id) antibody from transfected 293T cells.

[0092] FIGS. 86A and 86B demonstrate expression of CAR19 (construct #140) with an FMC63 domain as detected by a Flag tag (86A) and detection of the CAR19 by anti- FMC63 antibody (86B).

[0093] FIGS. 87A-87C demonstrate Trastuzumab scFv/anti-Id scFv fusion proteins bind both FMC63 and Her2. FIG. 87A demonstrates binding of a Trastuzumab scFv/anti-Id scFv fusion protein to FMC63. FIG. 87B demonstrates binding of a Trastuzumab scFv/anti-Id scFv fusion protein to Her2. FIG. 87C demonstrates binding of a CD19 expressing construct (#42) with the FMC63 coated plate as a control.

[0094] FIGS. 88A and 88B demonstrate recognition of Her2 by Trastuzumab scFv/anti-Id scFv fusion proteins. FIG. 88A demonstrates Her2 expression on SKOV3 cells. FIG. 88B demonstrates binding to the SKOV3-Her2 cells by the Trastuzumab scFv/anti-Id scFv fusion protein.

[0095] FIG. 89 shows CAR19-mediated cytotoxicity redirected to HER2+SKOV3 cells by a Trastuzumab scFv/anti-Id scFv fusion protein.

[0096] FIGS. 90A and 90B summarize the calculated cytotoxicity of CAR19-mediated killing as redirected by a Trastuzumab scFv/anti-Id scFv fusion protein. FIG. 90A shows the calculated cytotoxicity. FIG. 90B shows the calculated EC50 of construct #171.

[0097] FIG. 91 shows results of IFNγ ELISA for CAR19 killing redirected by construct #171.

[0098] FIGS. 92A and 92B demonstrate specificity of CAR19 redirected killing using Trastuzumab scFv/anti-Id scFv fusion proteins. FIG. 92A demonstrates results of CAR19-mediated cytotoxicity redirected to HER2+ SKOV3 cells by Trastuzumab scFv/anti-Id scFv construct #171 relative to a construct expressing an anti-Her2 protein (#16). FIG. 92B summaraizes the calculated cytotoxicity of CAR19-mediated killing as redirected by construct #171 or #16.

[0099] FIG. 93 demonstrates the lack of CAR19 redirected killing using Trastuzumab scFv/anti-Id scFv fusion proteins when the target cell (H929) lacks Her2.

### Definitions

[0100] In order for the present invention to be more readily understood, certain terms are first defined below. Additional definitions for the following terms and other terms are set forth throughout the specification.

[0101] Administration: As used herein, the term “administration” refers to the administration of a composition to a subject or system. Administration to an animal subject (e.g., to a human) may be by any appropriate route. For example, in some embodiments, administration may be bronchial (including by bronchial instillation), buccal, enteral, interdermal, intra-arterial, intradermal, intragastric, intramedullary, intramuscular, intranasal, intraperitoneal, intrathecal, intravenous, intraventricular, within a specific organ (e.g., intrahepatic), mucosal, nasal, oral, rectal, subcutaneous, sublingual, topical, tracheal (including by intratracheal instillation), transdermal, vaginal and vitreal. In some embodiments, administration may be intratumoral or peritumoral. In some embodiments, administration may involve intermittent dosing. In some embodiments, administration may involve continuous dosing (e.g., perfusion) for at least a selected period of time.

[0102] Adoptive cell therapy: As used herein, “adoptive cell therapy” or “ACT” involves the transfer of immune cells with antitumour activity into cancer patients. In some embodiments, ACT is a treatment approach that involves the use of lymphocytes with antitumour activity, the in vitro expansion of these cells to large numbers and their infusion into a cancer-bearing host.

[0103] Agent: The term “agent” as used herein may refer to a compound or entity of any chemical class including, for example, polypeptides, nucleic acids, saccharides, lipids, small molecules, metals, or combinations thereof. As will be clear from context, in some embodiments, an agent can be or comprise a cell or organism, or a fraction, extract, or component thereof. In some embodiments, an agent is or comprises a natural product in that it is found in and/or is obtained from nature. In some embodiments, an agent is or comprises one or more entities that is man-made in that it is designed, engineered, and/or produced through action of the hand of man and/or is not found in nature. In some embodiments, an agent may be utilized in isolated or pure form; in some embodiments, an agent may be utilized in crude form. In some embodiments, potential agents are provided as collections or libraries, for example that may be screened to identify or characterize active agents within them. Some particular embodiments of agents that may be utilized in accordance with the present invention include small molecules, antibodies, antibody fragments, aptamers, nucleic acids (e.g., siRNAs, shRNAs, DNA/RNA hybrids, antisense oligonucleotides, ribozymes), peptides, peptide mimetics, etc. In some embodiments, an agent is or comprises a polymer. In some embodiments, an agent is not a polymer and/or is substantially free of any polymer. In some embodiments, an agent contains at least one polymeric moiety. In some embodiments, an agent lacks or is substantially free of any polymeric moiety.

[0104] Amelioration: As used herein, “amelioration” refers to prevention, reduction and/or palliation of a state, or improvement of the state of a subject. Amelioration includes, but does not require, complete recovery or complete prevention of a disease, disorder or condition.

[0105] Amino acid: As used herein, term “amino acid,” in its broadest sense, refers to any compound and/or substance that can be incorporated into a polypeptide chain. In some embodiments, an amino acid has the general structure H₂N—C(H)(R)—COOH. In some embodiments, an amino acid is a naturally occurring amino acid. In some embodiments, an amino acid is a synthetic amino acid; in some embodiments, an amino acid is a d-amino acid; in some embodiments, an amino acid is an 1-amino acid. “Standard amino acid” refers to any of the twenty standard 1-amino acids commonly found in naturally occurring peptides. “Nonstandard amino acid” refers to any amino acid, other than the standard amino acids, regardless of whether it is prepared synthetically or obtained from a natural source. As used herein, “synthetic amino acid” encompasses chemically modified amino acids, including but not limited to salts, amino acid derivatives (such as amides), and/or substitutions. Amino acids, including carboxy- and/or amino-terminal amino acids in peptides, can be modified by methylation, amidation, acetylation, protecting groups, and/or substitution with other chemical groups that can change the peptide's circulating half-life without adversely affecting their activity. Amino acids may participate in a disulfide bond. Amino acids may comprise one or posttranslational modifications, such as association with one or more chemical entities (e.g., methyl groups, acetate groups, acetyl groups, phosphate groups, formyl moieties, isoprenoid groups, sulfate groups, polyethylene glycol moieties, lipid moieties, carbohydrate moieties, biotin moieties, etc.). The term “amino acid” is used interchangeably with “amino acid residue,” and may refer to a free amino acid and/or to an amino acid residue of a peptide. It will be apparent from the context in which the term is used whether it refers to a free amino acid or a residue of a peptide.

[0106] Antibody: As used herein, the term “antibody” refers to a polypeptide that includes canonical immunoglobulin sequence elements sufficient to confer specific binding to a particular target antigen. As is known in the art, intact antibodies as produced in nature are approximately 150 kD tetrameric agents comprised of two identical heavy chain polypeptides (about 50 kD each) and two identical light chain polypeptides (about 25 kD each) that associate with each other into what is commonly referred to as a “Y-shaped” structure. Each heavy chain is comprised of at least four domains (each about 110 amino acids long)—an amino-terminal variable (VH) domain (located at the tips of the Y structure), followed by three constant domains: CHL CH2, and the carboxy-terminal CH3 (located at the base of the Y′s stem). A short region, known as the “switch”, connects the heavy chain variable and constant regions. The “hinge” connects CH2 and CH3 domains to the rest of the antibody. Two disulfide bonds in this hinge region connect the two heavy chain polypeptides to one another in an intact antibody. Each light chain is comprised of two domains—an amino-terminal variable (VL) domain, followed by a carboxy-terminal constant (CL) domain, separated from one another by another “switch”. Intact antibody tetramers are composed of two heavy chain-light chain dimers in which the heavy and light chains are linked to one another by a single disulfide bond; two other disulfide bonds connect the heavy chain hinge regions to one another, so that the dimers are connected to one another and the tetramer is formed. Naturally-produced antibodies are also glycosylated, typically on the CH2 domain. Each domain in a natural antibody has a structure characterized by an “immunoglobulin fold” formed from two beta sheets (e.g., 3-, 4-, or 5-stranded sheets) packed against each other in a compressed antiparallel beta barrel. Each variable domain contains three hypervariable loops known as “complement determining regions” (CDR1, CDR2, and CDR3) and four somewhat invariant “framework” regions (FR1, FR2, FR3, and FR4). When natural antibodies fold, the FR regions form the beta sheets that provide the structural framework for the domains, and the CDR loop regions from both the heavy and light chains are brought together in three-dimensional space so that they create a single hypervariable antigen binding site located at the tip of the Y structure. The Fc region of naturally-occurring antibodies binds to elements of the complement system, and also to receptors on effector cells, including for example effector cells that mediate cytotoxicity. As is known in the art, affinity and/or other binding attributes of Fc regions for Fc receptors can be modulated through glycosylation or other modification. In some embodiments, antibodies produced and/or utilized in accordance with the present disclosure include glycosylated Fc domains, including Fc domains with modified or engineered such glycosylation. For purposes of the present disclosure, in certain embodiments, any polypeptide or complex of polypeptides that includes sufficient immunoglobulin domain sequences as found in natural antibodies can be referred to and/or used as an “antibody”, whether such polypeptide is naturally produced (e.g., generated by an organism reacting to an antigen), or produced by recombinant engineering, chemical synthesis, or other artificial system or methodology. In some embodiments, an antibody is polyclonal; in some embodiments, an antibody is monoclonal. In some embodiments, an antibody has constant region sequences that are characteristic of mouse, rabbit, primate, or human antibodies. In some embodiments, antibody sequence elements are fully human, or are humanized, primatized, chimeric, etc, as is known in the art. Moreover, the term “antibody” as used herein, can refer in appropriate embodiments (unless otherwise stated or clear from context) to any of the art-known or developed constructs or formats for utilizing antibody structural and functional features in alternative presentation. For example, in some embodiments, an antibody utilized in accordance with the present disclosure is in a format selected from, but not limited to, intact IgG, IgE and IgM, bi- or multi- specific antibodies (e.g., Zybodies®, etc), single chain Fvs, polypeptide-Fc fusions, Fabs, cameloid antibodies, masked antibodies (e.g., Probodies®), Small Modular ImmunoPharmaceuticals (“SMIPsTM”), single chain or Tandem diabodies (TandAb®), Anticalins®, Nanobodies®, minibodies, BiTE®s, ankyrin repeat proteins or DARPINs®, Avimers®, a DART, a TCR-like antibody, Adnectins®, Affilins®, Trans-bodies®, Affibodies®, a TrimerX®, MicroProteins, Fynomers®, Centyrins®, and a KALBITOR®. In some embodiments, an antibody may lack a covalent modification (e.g., attachment of a glycan) that it would have if produced naturally. In some embodiments, an antibody may contain a covalent modification (e.g., attachment of a glycan, a payload (e.g., a detectable moiety, a therapeutic moiety, a catalytic moiety, etc.), or other pendant group (e.g., poly-ethylene glycol, etc.)).

[0107] Antibody Dependent Cellular Cytotoxicity: As used herein, the term “antibody-dependent cellular cytotoxicity” or “ADCC” refers to a phenomenon in which target cells bound by antibody are killed by immune effector cells. Without wishing to be bound by any particular theory, ADCC is typically understood to involve Fc receptor (FcR)-bearing effector cells can recognizing and subsequently killing antibody-coated target cells (e.g., cells that express on their surface specific antigens to which an antibody is bound). Effector cells that mediate ADCC can include immune cells, including but not limited to one or more of natural killer (NK) cells, macrophage, neutrophils, eosinophils.

[0108] Antibody Fragment: As used herein, an “antibody fragment” includes a portion of an intact antibody, such as, for example, the antigen-binding or variable region of an antibody. Examples of antibody fragments include Fab, Fab′, F(ab′)₂, and Fv fragments; triabodies; tetrabodies; linear antibodies; single-chain antibody molecules; and multi-specific antibodies formed from antibody fragments. For example, antibody fragments include isolated fragments, “Fv” fragments (consisting of the variable regions of the heavy and light chains), recombinant single chain polypeptide molecules in which light and heavy chain variable regions are connected by a peptide linker (“scFv proteins”), recombinant single domain antibodies consisting of a variable region of an antibody heavy chain (e.g., VHH), and minimal recognition units consisting of the amino acid residues that mimic a hypervariable region (e.g., a hypervariable region of a heavy chain variable region (VH), a hypervariable region of a light chain variable region (VL), one or more CDR domains within the VH, and/or one or more CDR domains within the VL). In many embodiments, an antibody fragment contains sufficient sequence of the parent antibody of which it is a fragment that it binds to the same antigen as does the parent antibody; in some embodiments, a fragment binds to the antigen with a comparable affinity to that of the parent antibody and/or competes with the parent antibody for binding to the antigen. Examples of antigen binding fragments of an antibody include, but are not limited to, Fab fragment, Fab′ fragment, F(ab′)₂ fragment, scFv fragment, Fv fragment, dsFv diabody, dAb fragment, Fd′ fragment, Fd fragment, heavy chain variable region, and an isolated complementarity determining region (CDR) region. An antigen binding fragment of an antibody may be produced by any means. For example, an antigen binding fragment of an antibody may be enzymatically or chemically produced by fragmentation of an intact antibody and/or it may be recombinantly produced from a gene encoding the partial antibody sequence. Alternatively or additionally, antigen binding fragment of an antibody may be wholly or partially synthetically produced. An antigen binding fragment of an antibody may optionally comprise a single chain antibody fragment. Alternatively or additionally, an antigen binding fragment of an antibody may comprise multiple chains which are linked together, for example, by disulfide linkages. An antigen binding fragment of an antibody may optionally comprise a multimolecular complex. A functional antibody fragment typically comprises at least about 50 amino acids and more typically comprises at least about 200 amino acids.

[0109] Antigen: The term “antigen”, as used herein, refers to an agent that elicits an immune response; and/or an agent that binds to a T cell receptor (e.g., when presented by an WIC molecule) or to an antibody or antibody fragment. In some embodiments, an antigen elicits a humoral response (e.g., including production of antigen-specific antibodies); in some embodiments, an antigen elicits a cellular response (e.g., involving T-cells whose receptors specifically interact with the antigen). In some embodiments, an antigen binds to an antibody and may or may not induce a particular physiological response in an organism. In general, an antigen may be or include any chemical entity such as, for example, a small molecule, a nucleic acid, a polypeptide, a carbohydrate, a lipid, a polymer (in some embodiments other than a biologic polymer (e.g., other than a nucleic acid or amino acid polymer)) etc. In some embodiments, an antigen is or comprises a polypeptide. In some embodiments, an antigen is or comprises a glycan. Those of ordinary skill in the art will appreciate that, in general, an antigen may be provided in isolated or pure form, or alternatively may be provided in crude form (e.g., together with other materials, for example in an extract such as a cellular extract or other relatively crude preparation of an antigen-containing source), or alternatively may exist on or in a cell. In some embodiments, an antigen is a recombinant antigen.

[0110] Antigen presenting cell: The phrase “antigen presenting cell” or “APC,” as used herein, has its art understood meaning referring to cells that process and present antigens to T-cells. Exemplary APC include dendritic cells, macrophages, B cells, certain activated epithelial cells, and other cell types capable of TCR stimulation and appropriate T cell costimulation.

[0111] Approximately or about: As used herein, the term “approximately” or “about,” as applied to one or more values of interest, refers to a value that is similar to a stated reference value. In certain embodiments, the term “approximately” or “about” refers to a range of values that fall within 25%, 20%, 19%, 18%, 17%, 16%, 15%, 14%, 13%, 12%, 11%, 10%, 9%, 8%, 7%, 6%, 5%, 4%, 3%, 2%, 1%, or less in either direction (greater than or less than) of the stated reference value unless otherwise stated or otherwise evident from the context (except where such number would exceed 100% of a possible value).

[0112] Binding: It will be understood that the term “binding”, as used herein, typically refers to a non-covalent association between or among two or more entities. “Direct” binding involves physical contact between entities or moieties; indirect binding involves physical interaction by way of physical contact with one or more intermediate entities. Binding between two or more entities can typically be assessed in any of a variety of contexts—including where interacting entities or moieties are studied in isolation or in the context of more complex systems (e.g., while covalently or otherwise associated with a carrier entity and/or in a biological system or cell).

[0113] Cancer: The terms “cancer”, “malignancy”, “neoplasm”, “tumor”, and “carcinoma”, are used interchangeably herein to refer to cells that exhibit relatively abnormal, uncontrolled, and/or autonomous growth, so that they exhibit an aberrant growth phenotype characterized by a significant loss of control of cell proliferation. In general, cells of interest for detection or treatment in the present application include precancerous (e.g., benign), malignant, pre-metastatic, metastatic, and non-metastatic cells. The teachings of the present disclosure may be relevant to any and all cancers. To give but a few, non-limiting examples, in some embodiments, teachings of the present disclosure are applied to one or more cancers such as, for example, hematopoietic cancers including leukemias, lymphomas (Hodgkins and non-Hodgkins), myelomas and myeloproliferative disorders; sarcomas, melanomas, adenomas, carcinomas of solid tissue, squamous cell carcinomas of the mouth, throat, larynx, and lung, liver cancer, genitourinary cancers such as prostate, cervical, bladder, uterine, and endometrial cancer and renal cell carcinomas, bone cancer, pancreatic cancer, skin cancer, cutaneous or intraocular melanoma, cancer of the endocrine system, cancer of the thyroid gland, cancer of the parathyroid gland, head and neck cancers, breast cancer, gastro-intestinal cancers and nervous system cancers, benign lesions such as papillomas, and the like.

[0114] Chimeric antigen receptor: “Chimeric antigen receptor” or “CAR” or “CARs” as used herein refers to engineered receptors, which graft an antigen specificity onto cells (for example T cells such as naive T cells, central memory T cells, effector memory T cells or combination thereof). CARs are also known as artificial T-cell receptors, chimeric T-cell receptors or chimeric immunoreceptors. In some embodiments, CARs comprise an antigen-specific targeting regions, an extracellular domain, a transmembrane domain, one or more co-stimulatory domains, and an intracellular signaling domain.

[0115] Combination Therapy: As used herein, the term “combination therapy” refers to those situations in which a subject is simultaneously exposed to two or more therapeutic regimens (e.g., two or more therapeutic agents). In some embodiments, two or more agents may be administered simultaneously; in some embodiments, such agents may be administered sequentially; in some embodiments, such agents are administered in overlapping dosing regimens.

[0116] Domain: The term “domain” is used herein to refer to a section or portion of an entity. In some embodiments, a “domain” is associated with a particular structural and/or functional feature of the entity so that, when the domain is physically separated from the rest of its parent entity, it substantially or entirely retains the particular structural and/or functional feature. Alternatively or additionally, a domain may be or include a portion of an entity that, when separated from that (parent) entity and linked with a different (recipient) entity, substantially retains and/or imparts on the recipient entity one or more structural and/or functional features that characterized it in the parent entity. In some embodiments, a domain is a section or portion of a molecular (e.g., a small molecule, carbohydrate, a lipid, a nucleic acid, or a polypeptide). In some embodiments, a domain is a section of a polypeptide; in some such embodiments, a domain is characterized by a particular structural element (e.g., a particular amino acid sequence or sequence motif, a-helix character, (3-sheet character, coiled-coil character, random coil character, etc), and/or by a particular functional feature (e.g., binding activity, enzymatic activity, folding activity, signaling activity, etc).

[0117] Dosage form: As used herein, the terms “dosage form” and “unit dosage form” refer to a physically discrete unit of a therapeutic agent for the patient to be treated. Each unit contains a predetermined quantity of active material calculated to produce the desired therapeutic effect. It will be understood, however, that the total dosage of the composition will be decided by the attending physician within the scope of sound medical judgment.

[0118] Dosing regimen: As used herein, the term “dosing regimen” refers to a set of unit doses (typically more than one) that are administered individually to a subject, typically separated by periods of time. In some embodiments, a given therapeutic agent has a recommended dosing regimen, which may involve one or more doses. In some embodiments, a dosing regimen comprises a plurality of doses each of which are separated from one another by a time period of the same length; in some embodiments, a dosing regimen comprises a plurality of doses and at least two different time periods separating individual doses. In some embodiments, all doses within a dosing regimen are of the same unit dose amount. In some embodiments, different doses within a dosing regimen are of different amounts. In some embodiments, a dosing regimen comprises a first dose in a first dose amount, followed by one or more additional doses in a second dose amount different from the first dose amount. In some embodiments, a dosing regimen comprises a first dose in a first dose amount, followed by one or more additional doses in a second dose amount same as the first dose amount. In some embodiments, a dosing regimen is correlated with a desired or beneficial outcome when administered across a relevant population (i.e., is a therapeutic dosing regimen).

[0119] Effector Function: As used herein, “effector function” refers a biochemical event that results from the interaction of an antibody Fc region with an Fc receptor or ligand. Effector functions include but are not limited to antibody-dependent cell-mediated cytotoxicity (ADCC), antibody-dependent cell-mediated phagocytosis (ADCP), and complement-mediated cytotoxicity (CMC). In some embodiments, an effector function is one that operates after the binding of an antigen, one that operates independent of antigen binding, or both.

[0120] Effector Cell: As used herein, “effector cell” refers to a cell of the immune system that expresses one or more Fc receptors and mediates one or more effector functions. In some embodiments, effector cells may include, but may not be limited to, one or more of monocytes, macrophages, neutrophils, dendritic cells, eosinophils, mast cells, platelets, large granular lymphocytes, Langerhans' cells, natural killer (NK) cells, T-lymphocytes, B-lymphocytes and may be from any organism including but not limited to humans, mice, rats, rabbits, and monkeys.

[0121] Expression: As used herein, “expression” of a nucleic acid sequence refers to one or more of the following events: (1) production of an RNA template from a DNA sequence (e.g., by transcription); (2) processing of an RNA transcript (e.g., by splicing, editing, 5′ cap formation, and/or 3′ end formation); (3) translation of an RNA into a polypeptide or protein; and/or (4) post-translational modification of a polypeptide or protein.

[0122] Extracellular domain: As used herein, “extracellular domain” (or “ECD”) refers to a portion of a polypeptide that extends beyond the transmembrane domain into extracellular space.

[0123] Fusion protein: As used herein, the term “fusion protein” generally refers to a polypeptide including at least two segments, each of which shows a high degree of amino acid identity to a peptide moiety that (1) occurs in nature, and/or (2) represents a functional domain of a polypeptide. Typically, a polypeptide containing at least two such segments is considered to be a fusion protein if the two segments are moieties that (1) are not included in nature in the same peptide, and/or (2) have not previously been linked to one another in a single polypeptide, and/or (3) have been linked to one another through action of the hand of man.

[0124] Gene: As used herein, the term “gene” has its meaning as understood in the art. It will be appreciated by those of ordinary skill in the art that the term “gene” may include gene regulatory sequences (e.g., promoters, enhancers, etc.) and/or intron sequences. It will further be appreciated that definitions of gene include references to nucleic acids that do not encode proteins but rather encode functional RNA molecules such as tRNAs, RNAi-inducing agents, etc. For the purpose of clarity we note that, as used in the present application, the term “gene” generally refers to a portion of a nucleic acid that encodes a protein; the term may optionally encompass regulatory sequences, as will be clear from context to those of ordinary skill in the art. This definition is not intended to exclude application of the term “gene” to non-protein-coding expression units but rather to clarify that, in most cases, the term as used in this document refers to a protein-coding nucleic acid.

[0125] Gene product or expression product: As used herein, the term “gene product” or “expression product” generally refers to an RNA transcribed from the gene (pre-and/or post-processing) or a polypeptide (pre- and/or post-modification) encoded by an RNA transcribed from the gene.

[0126] Idiotope: As used herein, the term “idiotope” refers to a unique antigenic determinant (epitope) of a variable region of an antibody, or antigen binding portion.

[0127] Idiotype: As used herein, the term “idiotype” refers to a set of idiotopes of a particular antibody, or antigen binding portion.

[0128] Immune response: As used herein, the term “immune response” refers to a response elicited in an animal. An immune response may refer to cellular immunity, humoral immunity or may involve both. An immune response may also be limited to a part of the immune system. For example, in certain embodiments, an immunogenic composition may induce an increased IFNγ response. In certain embodiments, an immunogenic composition may induce a mucosal IgA response (e.g., as measured in nasal and/or rectal washes). In certain embodiments, an immunogenic composition may induce a systemic IgG response (e.g., as measured in serum). In certain embodiments, an immunogenic composition may induce virus-neutralizing antibodies or a neutralizing antibody response. In certain embodiments, an immunogenic composition may induce a cytolytic (CTL) response by T cells.

[0129] Improve, increase, or reduce: As used herein, the terms “improve,” “increase” or “reduce,” or grammatical equivalents, indicate values that are relative to a baseline measurement, such as a measurement in the same individual prior to initiation of the treatment described herein, or a measurement in a control individual (or multiple control individuals) in the absence of the treatment described herein.

[0130] Individual, subject, patient: As used herein, the terms “subject,” “individual” or “patient” refer to a human or a non-human mammalian subject. The individual (also referred to as “patient” or “subject”) being treated is an individual (fetus, infant, child, adolescent, or adult) suffering from a disease, for example, cancer. In some embodiments, the subject is a human.

[0131] Linker: As used herein, the term “linker” refers to, e.g., in a fusion protein, an amino acid sequence of an appropriate length other than that appearing at a particular position in the natural protein and is generally designed to be flexible and/or to interpose a structure, such as an a-helix, between two protein moieties. In general, a linker allows two or more domains of a fusion protein to retain 50%, 55%, 60%, 65%, 70%, 75%, 80%, 85%, 90%, 95% or more of the biological activity of each of the domains. A linker may also referred to as a spacer.

[0132] Masking moiety: As used herein, “masking moiety” refers to a molecular moiety that, when linked to an antigen-binding protein described herein, is capable of masking the binding of such antigen-binding moiety to its target antigen. An antigen-binding protein comprising such a masking moiety is referred to herein as a “masked” antigen-binding protein.

[0133] Nucleic acid: As used herein, “nucleic acid”, in its broadest sense, refers to any compound and/or substance that is or can be incorporated into an oligonucleotide chain. In some embodiments, a nucleic acid is a compound and/or substance that is or can be incorporated into an oligonucleotide chain via a phosphodiester linkage. As will be clear from context, in some embodiments, “nucleic acid” refers to individual nucleic acid residues (e.g., nucleotides and/or nucleosides); in some embodiments, “nucleic acid” refers to an oligonucleotide chain comprising individual nucleic acid residues. In some embodiments, a “nucleic acid” is or comprises RNA; in some embodiments, a “nucleic acid” is or comprises DNA. In some embodiments, a nucleic acid is, comprises, or consists of one or more natural nucleic acid residues. In some embodiments, a nucleic acid is, comprises, or consists of one or more nucleic acid analogs. In some embodiments, a nucleic acid analog differs from a nucleic acid in that it does not utilize a phosphodiester backbone. For example, in some embodiments, a nucleic acid is, comprises, or consists of one or more “peptide nucleic acids”, which are known in the art and have peptide bonds instead of phosphodiester bonds in the backbone, are considered within the scope of the present invention. Alternatively or additionally, in some embodiments, a nucleic acid has one or more phosphorothioate and/or 5′-N-phosphoramidite linkages rather than phosphodiester bonds. In some embodiments, a nucleic acid is, comprises, or consists of one or more natural nucleosides (e.g., adenosine, thymidine, guanosine, cytidine, uridine, deoxyadenosine, deoxythymidine, deoxy guanosine, and deoxycytidine). In some embodiments, a nucleic acid is, comprises, or consists of one or more nucleoside analogs (e.g., 2-aminoadenosine, 2-thiothymidine, inosine, pyrrolo-pyrimidine, 3 -methyl adenosine, 5-methylcytidine, C-5 propynyl-cytidine, C-5 propynyl-uridine, 2-aminoadenosine, C5-bromouridine, C5-fluorouridine, C5-iodouridine, C5-propynyl-uridine, C5 -propynyl-cytidine, C5-methylcytidine, 2-aminoadenosine, 7-deazaadenosine, 7-deazaguanosine, 8-oxoadenosine, 8-oxoguanosine, 0(6)-methylguanine, 2-thiocytidine, methylated bases, intercalated bases, and combinations thereof). In some embodiments, a nucleic acid comprises one or more modified sugars (e.g., 2′-fluororibose, ribose, 2′-deoxyribose, arabinose, and hexose) as compared with those in natural nucleic acids. In some embodiments, a nucleic acid has a nucleotide sequence that encodes a functional gene product such as an RNA or protein. In some embodiments, a nucleic acid includes one or more introns. In some embodiments, nucleic acids are prepared by one or more of isolation from a natural source, enzymatic synthesis by polymerization based on a complementary template (in vivo or in vitro), reproduction in a recombinant cell or system, and chemical synthesis. In some embodiments, a nucleic acid is at least 3, 4, 5, 6, 7, 8, 9, 10, 15, 20, 25, 30, 35, 40, 45, 50, 55, 60, 65, 70, 75, 80, 85, 90, 95, 100, 1 10, 120, 130, 140, 150, 160, 170, 180, 190, 20, 225, 250, 275, 300, 325, 350, 375, 400, 425, 450, 475, 500, 600, 700, 800, 900, 1000, 1500, 2000, 2500, 3000, 3500, 4000, 4500, 5000 or more residues long. In some embodiments, a nucleic acid is single stranded; in some embodiments, a nucleic acid is double stranded. In some embodiments a nucleic acid has a nucleotide sequence comprising at least one element that encodes, or is the complement of a sequence that encodes, a polypeptide. In some embodiments, a nucleic acid has enzymatic activity.

[0134] Operably linked: As used herein, “operably linked” refers to a juxtaposition wherein the components described are in a relationship permitting them to function in their intended manner. A control sequence “operably linked” to one or more coding sequence(s) is ligated in such a way that expression of the one or more coding sequence(s) is achieved under conditions compatible with the control sequences. “Operably linked” sequences include both expression control sequences that are contiguous with the gene(s) of interest and expression control sequences that act in trans or at a distance to control the gene(s) of interest. The term “expression control sequence” as used herein refers to polynucleotide sequences that are necessary to effect the expression and processing of coding sequences to which they are ligated. Expression control sequences include appropriate transcription initiation, termination, promoter and enhancer sequences; efficient RNA processing signals such as splicing and polyadenylation signals; sequences that stabilize cytoplasmic mRNA; sequences that enhance translation efficiency (i.e., Kozak consensus sequence); sequences that enhance protein stability; and when desired, sequences that enhance protein secretion. The nature of such control sequences differs depending upon the host organism. For example, in prokaryotes, such control sequences generally include promoter, ribosomal binding site, and transcription termination sequence, while in eukaryotes, typically, such control sequences include promoters and transcription termination sequence. The term “control sequences” is intended to include components whose presence is essential for expression and processing, and can also include additional components whose presence is advantageous, for example, leader sequences and fusion partner sequences.

[0135] Patient: As used herein, the term “patient” refers to any organism to which a provided composition is or may be administered, e.g., for experimental, diagnostic, prophylactic, cosmetic, and/or therapeutic purposes. Typical patients include animals (e.g., mammals such as mice, rats, rabbits, non-human primates, and/or humans). In some embodiments, a patient is a human. In some embodiments, a patient is suffering from or susceptible to one or more disorders or conditions. In some embodiments, a patient displays one or more symptoms of a disorder or condition. In some embodiments, a patient has been diagnosed with one or more disorders or conditions. In some embodiments, the disorder or condition is or includes cancer, or presence of one or more tumors. In some embodiments, the patient is receiving or has received certain therapy to diagnose and/or to treat a disease, disorder, or condition.

[0136] Peptide: The term “peptide” as used herein refers to a polypeptide that is typically relatively short, for example having a length of less than about 100 amino acids, less than about 50 amino acids, less than 20 amino acids, or less than 10 amino acids.

[0137] Pharmaceutically acceptable: The term “pharmaceutically acceptable” as used herein, refers to substances that, within the scope of sound medical judgment, are suitable for use in contact with the tissues of human beings and animals without excessive toxicity, irritation, allergic response, or other problem or complication, commensurate with a reasonable benefit/risk ratio.

[0138] Polypeptide: As used herein, a “polypeptide”, generally speaking, is a string of at least two amino acids attached to one another by a peptide bond. In some embodiments, a polypeptide may include at least 3-5 amino acids, each of which is attached to others by way of at least one peptide bond. Those of ordinary skill in the art will appreciate that polypeptides sometimes include “non-natural” amino acids or other entities that nonetheless are capable of integrating into a polypeptide chain, optionally.

[0139] Promoter: As used herein, a “promoter” is a DNA sequence recognized by the synthetic machinery of the cell, or introduced synthetic machinery, required to initiate the specific transcription of a polynucleotide sequence. A “constitutive” promoter is a nucleotide sequence which, when operably linked with a polynucleotide that encodes or specifies a gene product, causes the gene product to be produced in a cell under most or all physiological conditions of the cell. An “inducible” promoter is a nucleotide sequence that, when operably linked with a polynucleotide that encodes or specifies a gene product, causes the gene product to be produced in a cell substantially only when a promoter-specific inducer is present in the cell.

[0140] Protein: As used herein, the term “protein”, refers to a polypeptide (i.e., a string of at least two amino acids linked to one another by peptide bonds). Proteins may include moieties other than amino acids (e.g., may be glycoproteins, proteoglycans, etc.) and/or may be otherwise processed or modified. Those of ordinary skill in the art will appreciate that a “protein” can be a complete polypeptide chain as produced by a cell (with or without a signal sequence), or can be a portion thereof. Those of ordinary skill will appreciate that a protein can sometimes include more than one polypeptide chain, for example linked by one or more disulfide bonds or associated by other means. Polypeptides may contain L-amino acids, D-amino acids, or both and may contain any of a variety of amino acid modifications or analogs known in the art. Useful modifications include, e.g., terminal acetylation, amidation, methylation, etc. In some embodiments, proteins may comprise natural amino acids, non-natural amino acids, synthetic amino acids, and combinations thereof.

[0141] Reference: As used herein, “reference” describes a standard or control relative to which a comparison is performed. For example, in some embodiments, an agent, animal, individual, population, sample, sequence or value of interest is compared with a reference or control agent, animal, individual, population, sample, sequence or value. In some embodiments, a reference or control is tested and/or determined substantially simultaneously with the testing or determination of interest. In some embodiments, a reference or control is a historical reference or control, optionally embodied in a tangible medium. Typically, as would be understood by those skilled in the art, a reference or control is determined or characterized under comparable conditions or circumstances to those under assessment. Those skilled in the art will appreciate when sufficient similarities are present to justify reliance on and/or comparison to a particular possible reference or control.

[0142] Solid tumor: As used herein, the term “solid tumor” refers to an abnormal mass of tissue that usually does not contain cysts or liquid areas. Solid tumors may be benign or malignant. Different types of solid tumors are named for the type of cells that form them. Examples of solid tumors are sarcomas, carcinomas, lymphomas, mesothelioma, neuroblastoma, retinoblastoma, etc.

[0143] Stage of cancer: As used herein, the term “stage of cancer” refers to a qualitative or quantitative assessment of the level of advancement of a cancer. Criteria used to determine the stage of a cancer include, but are not limited to, the size of the tumor and the extent of metastases (e.g., localized or distant).

[0144] Subject: By “subject” is meant a mammal (e.g., a human, in some embodiments including prenatal human forms). In some embodiments, a subject is suffering from a relevant disease, disorder or condition. In some embodiments, a subject is susceptible to a disease, disorder, or condition. In some embodiments, a subject displays one or more symptoms or characteristics of a disease, disorder or condition. In some embodiments, a subject does not display any symptom or characteristic of a disease, disorder, or condition. In some embodiments, a subject is someone with one or more features characteristic of susceptibility to or risk of a disease, disorder, or condition. In some embodiments, a subject is a patient. In some embodiments, a subject is an individual to whom diagnosis and/or therapy is and/or has been administered.

[0145] Suffering from: An individual who is “suffering from” a disease, disorder, or condition (e.g., cancer) has been diagnosed with and/or exhibits one or more symptoms of the disease, disorder, or condition.

[0146] Symptoms are reduced: According to the present invention, “symptoms are reduced” when one or more symptoms of a particular disease, disorder or condition is reduced in magnitude (e.g., intensity, severity, etc.) or frequency. For purposes of clarity, a delay in the onset of a particular symptom is considered one form of reducing the frequency of that symptom. It is not intended that the present invention be limited only to cases where the symptoms are eliminated. The present invention specifically contemplates treatment such that one or more symptoms is/are reduced (and the condition of the subject is thereby “improved”), albeit not completely eliminated.

[0147] T cell receptor: As used herein, a “T cell receptor” or “TCR” refers to the antigen-recognition molecules present on the surface of T-cells. During normal T-cell development, each of the four TCR genes, α, β, γ, and δ, can rearrange leading to highly diverse TCR proteins.

[0148] Therapeutic agent: As used herein, the phrase “therapeutic agent” in general refers to any agent that elicits a desired pharmacological effect when administered to an organism. In some embodiments, an agent is considered to be a therapeutic agent if it demonstrates a statistically significant effect across an appropriate population. In some embodiments, the appropriate population may be a population of model organisms. In some embodiments, an appropriate population may be defined by various criteria, such as a certain age group, gender, genetic background, preexisting clinical conditions, etc. In some embodiments, a therapeutic agent is a substance that can be used to alleviate, ameliorate, relieve, inhibit, prevent, delay onset of, reduce severity of, and/or reduce incidence of one or more symptoms or features of a disease, disorder, and/or condition. In some embodiments, a “therapeutic agent” is an agent that has been or is required to be approved by a government agency before it can be marketed for administration to humans. In some embodiments, a “therapeutic agent” is an agent for which a medical prescription is required for administration to humans.

[0149] Therapeutically effective amount: As used herein, the term “therapeutically effective amount” means an amount that is sufficient, when administered to a population suffering from or susceptible to a disease, disorder, and/or condition in accordance with a therapeutic dosing regimen, to treat the disease, disorder, and/or condition. In some embodiments, a therapeutically effective amount is one that reduces the incidence and/or severity of, stabilizes one or more characteristics of, and/or delays onset of, one or more symptoms of the disease, disorder, and/or condition. Those of ordinary skill in the art will appreciate that the term “therapeutically effective amount” does not in fact require successful treatment be achieved in a particular individual. Rather, a therapeutically effective amount may be that amount that provides a particular desired pharmacological response in a significant number of subjects when administered to patients in need of such treatment. For example, in some embodiments, “therapeutically effective amount” refers to an amount which, when administered to an individual in need thereof in the context of inventive therapy, will block, stabilize, attenuate, or reverse a cancer-supportive process occurring in said individual, or will enhance or increase a cancer-suppressive process in said individual. In the context of cancer treatment, a “therapeutically effective amount” is an amount which, when administered to an individual diagnosed with a cancer, will prevent, stabilize, inhibit, or reduce the further development of cancer in the individual. A particularly preferred “therapeutically effective amount” of a composition described herein reverses (in a therapeutic treatment) the development of a malignancy such as a pancreatic carcinoma or helps achieve or prolong remission of a malignancy. A therapeutically effective amount administered to an individual to treat a cancer in that individual may be the same or different from a therapeutically effective amount administered to promote remission or inhibit metastasis. As with most cancer therapies, the therapeutic methods described herein are not to be interpreted as, restricted to, or otherwise limited to a “cure” for cancer; rather the methods of treatment are directed to the use of the described compositions to “treat” a cancer, i.e., to effect a desirable or beneficial change in the health of an individual who has cancer. Such benefits are recognized by skilled healthcare providers in the field of oncology and include, but are not limited to, a stabilization of patient condition, a decrease in tumor size (tumor regression), an improvement in vital functions (e.g., improved function of cancerous tissues or organs), a decrease or inhibition of further metastasis, a decrease in opportunistic infections, an increased survivability, a decrease in pain, improved motor function, improved cognitive function, improved feeling of energy (vitality, decreased malaise), improved feeling of well-being, restoration of normal appetite, restoration of healthy weight gain, and combinations thereof. In addition, regression of a particular tumor in an individual (e.g., as the result of treatments described herein) may also be assessed by taking samples of cancer cells from the site of a tumor such as a pancreatic adenocarcinoma (e.g., over the course of treatment) and testing the cancer cells for the level of metabolic and signaling markers to monitor the status of the cancer cells to verify at the molecular level the regression of the cancer cells to a less malignant phenotype. For example, tumor regression induced by employing the methods of this invention would be indicated by finding a decrease in one or more pro-angiogenic markers, an increase in anti-angiogenic markers, the normalization (i.e., alteration toward a state found in normal individuals not suffering from cancer) of metabolic pathways, intercellular signaling pathways, or intracellular signaling pathways that exhibit abnormal activity in individuals diagnosed with cancer. Those of ordinary skill in the art will appreciate that, in some embodiments, a therapeutically effective amount may be formulated and/or administered in a single dose. In some embodiments, a therapeutically effective amount may be formulated and/or administered in a plurality of doses, for example, as part of a dosing regimen.

[0150] Transformation: As used herein, “transformation” refers to any process by which exogenous DNA is introduced into a host cell. Transformation may occur under natural or artificial conditions using various methods well known in the art. Transformation may rely on any known method for the insertion of foreign nucleic acid sequences into a prokaryotic or eukaryotic host cell. In some embodiments, a particular transformation methodology is selected based on the host cell being transformed and may include, but is not limited to, viral infection, electroporation, mating, lipofection. In some embodiments, a “transformed” cell is stably transformed in that the inserted DNA is capable of replication either as an autonomously replicating plasmid or as part of the host chromosome. In some embodiments, a transformed cell transiently expresses introduced nucleic acid for limited periods of time.

[0151] Treatment: As used herein, the term “treatment” (also “treat” or “treating”) refers to any administration of a substance that partially or completely alleviates, ameliorates, relives, inhibits, delays onset of, reduces severity of, and/or reduces incidence of one or more symptoms, features, and/or causes of a particular disease, disorder, and/or condition (e.g., cancer). Such treatment may be of a subject who does not exhibit signs of the relevant disease, disorder and/or condition and/or of a subject who exhibits only early signs of the disease, disorder, and/or condition. Alternatively or additionally, such treatment may be of a subject who exhibits one or more established signs of the relevant disease, disorder and/or condition. In some embodiments, treatment may be of a subject who has been diagnosed as suffering from the relevant disease, disorder, and/or condition. In some embodiments, treatment may be of a subject known to have one or more susceptibility factors that are statistically correlated with increased risk of development of the relevant disease, disorder, and/or condition.

[0152] Tumor infiltrating lymphocyte: As used herein, the term “tumor-infiltrating lymphocytes” refers to white blood cells of a subject afflicted with a cancer (such as melanoma), that have left the blood stream and have migrated into a tumor. In some embodiments, tumor-infiltrating lymphocytes have tumor specificity.

[0153] Vector: As used herein, “vector” refers to a nucleic acid molecule capable of transporting another nucleic acid to which it is associated. In some embodiments, vectors are capable of extra-chromosomal replication and/or expression of nucleic acids to which they are linked in a host cell such as a eukaryotic and/or prokaryotic cell. Vectors capable of directing the expression of operatively linked genes are referred to herein as “expression vectors.”

### DETAILED DESCRIPTION

[0154] Among other things, the present invention provides methods and compositions useful for treatment of cancer. Specifically, the present disclosure provides cellular therapeutics, e.g., immune cells, genetically modified with an integrated gene, e.g., a nucleotide sequence of interest (e.g., a constitutive expression construct and/or an inducible expression construct that includes such nucleotide sequence). In some embodiments, expression of a nucleotide sequence of interest can be designed to be constitutive or inducible by appropriate selection, construction and/or design of an expressed promoter sequence operably linked to such nucleotide sequence of interest, as described herein. In the case of a constitutive expression construct, a gene in the construct is constitutively expressed. In the case of an inducible expression construct, a cellular therapeutic can be genetically modified with a nucleic acid encoding an antigen binding receptor and with an inducible expression construct. Upon binding of a target antigen, an antigen binding receptor of a cellular therapeutic induces expression of a gene included in an inducible expression construct, e.g., as depicted in FIG. 1. In certain embodiments, expression of such gene facilitates and/or improves treatment of cancer, e.g., by one or more cellular therapies. The invention also specifically discloses protein therapeutics that include proteins encoded by such genes (e.g., soluble forms of such gene products, e.g., pharmaceutical compositions that include such proteins for administration), and nucleic acids encoding such proteins, such as for gene therapy.

### Constitutive Expression Constructs

[0155] In some embodiments, the disclosure includes constitutive expression constructs. In some embodiments, a constitutive expression construct comprises a nucleic acid sequence that includes at least a promoter operably linked to a nucleotide sequence of interest, e.g., a gene described herein. A constitutive expression construct can comprise regulatory sequences, such as transcription and translation initiation and termination codons. In some embodiments, such regulatory sequences are specific to the type of cell into which the non-inducible expression construct is to be introduced, as appropriate. A constitutive expression construct can comprise a native or non-native promoter operably linked to a nucleotide sequence of interest. Preferably, the promoter is functional in immune cells. Exemplary promoters include, e.g., CMV, ElF, VAV, TCRvbeta, MCSV, and PGK promoter. Operably linking of a nucleotide sequence with a promoter is within the skill of the artisan. In some embodiments, a constitutive expression construct is or includes a recombinant expression vector described herein.

### Inducible Expression Constructs and Inducible Expression

[0156] For inducible expression, a cellular therapeutic of the present disclosure can include (i) one or more types of antigen binding receptors comprising an extracellular domain, a transmembrane domain, and an intracellular (or cytoplasmic) domain, and (ii) an inducible expression construct.

[0157] Antigen Binding Receptors

[0158] The extracellular domain of an antigen binding receptor comprises a target-specific antigen binding domain. The intracellular domain (or cytoplasmic domain) of an antigen binding receptor comprises a signaling domain. The signaling domain includes an amino acid sequence that, upon binding of target antigen to the antigen binding domain, initiates and/or mediates an intracellular signaling pathway that can activate, among other things, an inducible expression construct described herein, such that an inducible gene is expressed. In some embodiments, a signaling domain further includes one or more additional signaling regions (e.g., costimulatory signaling regions) that activate one or more immune cell effector functions (e.g., native immune cell effector functions). In some embodiments, the signaling domain activates T cell activation, proliferation, survival, or other T cell function, but does not induce cytotoxic activity. In some embodiments, an antigen binding receptor includes all or part of a chimeric antigen receptor (CAR). Such CARs are known in the art (see, e.g., Gill et al., Immunol. Rev. 263:68-89 (2015); Stauss et al., Curr. Opin. Pharmacol. 24:113-118 (2015)).

### Antigen Binding Domain

[0159] An antigen binding domain can be or include any polypeptide that specifically binds to a target antigen, e.g., a tumor antigen described herein. For example, in some embodiments, an antigen binding domain includes an antibody or antigen-binding fragment described herein (e.g., an Fab fragment, Fab′ fragment, F(ab′)₂ fragment, scFv fragment, Fv fragment, dsFv diabody, dAb fragment, Fd′ fragment, Fd fragment, an isolated complementarity determining region (CDR), a cameloid antibody, a masked antibody (e.g., Probody®), a single chain or Tandem diabody (TandAb®), a VHH, an Anticalin®, a single-domain antibody (e.g., Nanobody®), an ankyrin repeat protein or DARPIN®, an Avimer®, an Adnectin®, an Affilin®, an Affibody®, a Fynomer®, or a Centyrin®). In some embodiments, an antigen binding domain is or includes a T cell receptor (TCR) or antigen-binding portion thereof. In some embodiments, an antigen binding domain is a pH sensitive domain (see, e.g., Schroter et al., MAbs 7:138-51 (2015)).

[0160] Antigen binding domains can be selected based on, e.g., type and number of target antigens present on or near a surface of a target cell. For example, an antigen binding domain can be chosen to recognize an antigen that acts as a cell surface marker on a target cell associated with a particular disease state. In some embodiments, an antigen binding domain is selected to specifically bind to an antigen on a tumor cell. Tumor antigens are proteins that are produced by tumor cells and, in some embodiments, that elicit an immune response, particularly T-cell mediated immune responses. Selection of an antigen binding domain can depend on, e.g., a particular type of cancer to be treated.

### Transmembrane Domain

[0161] In general, a “transmembrane domain”, as used herein, refers to a domain having an attribute of being present in the membrane (e.g., spanning a portion or all of a cellular membrane). As will be appreciated, it is not required that every amino acid in a transmembrane domain be present in the membrane. For example, in some embodiments, a transmembrane domain is characterized in that a designated stretch or portion of a protein is substantially located in the membrane. As is well known in the art, amino acid or nucleic acid sequences may be analyzed using a variety of algorithms to predict protein subcellular localization (e.g., transmembrane localization). Exemplary such programs include psort (PSORT.org), Prosite (prosite.expasy.org), among others.

[0162] The type of transmembrane domain included in an antigen binding receptor described herein is not limited to any particular type. In some embodiments, a transmembrane domain is selected that is naturally associated with an antigen binding domain and/or intracellular domain. In some instances, a transmembrane domain includes a modification of one or more amino acids (e.g., deletion, insertion, and/or substitution), e.g., to avoid binding of such domains to a transmembrane domain of the same or different surface membrane proteins to minimize interactions with other members of the receptor complex.

[0163] A transmembrane domain can be derived either from a natural or from a synthetic source. Where the source is natural, a domain may be derived from any membrane-bound or transmembrane protein. Exemplary transmembrane regions can be derived from (e.g., can comprise at least a transmembrane region(s) of) an alpha, beta or zeta chain of a T-cell receptor, CD28, CD3 epsilon, CD45, CD4, CD5, CD8, CD9, CD16, CD22, CD27, CD33, CD37, CD64, CD80, CD86, CD134, CD137, TNFSFR25, or CD154. Alternatively, a transmembrane domain can be synthetic (and can, e.g., comprise predominantly hydrophobic residues such as leucine and valine). In some embodiments, a triplet of phenylalanine, tryptophan and valine are included at each end of a synthetic transmembrane domain. In some embodiments, a transmembrane domain is directly linked to a cytoplasmic domain. In some embodiments, a short oligo- or polypeptide linker (e.g., between 2 and 10 amino acids in length) may form a linkage between a transmembrane domain and an intracellular domain. In some embodiments, a linker is a glycine-serine doublet.

### Cytoplasmic Domain

[0164] The intracellular domain (or cytoplasmic domain) comprises a signaling domain that, upon binding of target antigen to the antigen binding domain, initiates and/or mediates an intracellular signaling pathway that induces expression of an inducible expression construct described herein.

[0165] Intracellular signaling domains that can transduce a signal upon binding of an antigen to an immune cell are known, any of which can be used herein. For example, cytoplasmic sequences of a T cell receptor (TCR) are known to initiate signal transduction following TCR binding to an antigen (see, e.g., Brownlie et al., Nature Rev. Immunol. 13:257-269 (2013)). In some embodiments, a signaling domain includes an immunoreceptor tyrosine-based activation motif (ITAM). Examples of ITAM containing cytoplasmic signaling sequences include those derived from TCR zeta, FcR gamma, FcR beta, CD3 zeta, CD3 gamma, CD3 delta, CD3 epsilon, CD5, CD22, CD79a, CD79b, and CD66d (see, e.g., Love et al., Cold Spring Harb. Perspect. Biol. 2:a002485 (2010); Smith-Garvin et al., Annu. Rev. Immunol. 27:591-619 (2009)).

[0166] In some embodiments, an intracellular signaling domain does not include a sequence that transduces a signal leading to killing by T cells (e.g., CD8⁺ T cells). For example, TCR cytoplasmic sequences are known to activate a number of signaling pathways, some of which lead to killing (see, e.g., Smith-Garvin et al., Annu. Rev. Immunol. 27:591-619 (2009)). In some embodiments, an intracellular domain includes a signaling domain that leads to signal transduction that mediates expression of an inducible expression construct, but not induction of killing (e.g., as exemplified in FIG. 6). For example, the cytoplasmic domain can include a cytoplasmic portion of a PDGF receptor and, upon antigen binding by the antigen binding domain, can lead to an intracellular signal that induces a promoter of the inducible expression construct. One of skill in the art, based on knowledge in the art, can select an intracellular domain and a cognate promoter to be included within an inducible expression construct.

[0167] It is known that signals generated through a TCR alone are insufficient for full activation of a T cell and that a secondary or co-stimulatory signal is also required. Thus, in some embodiments, a signaling domain further includes one or more additional signaling regions (e.g., costimulatory signaling regions) that activate one or more immune cell effector functions (e.g., a native immune cell effector function described herein). In some embodiments, a portion of such costimulatory signaling regions can be used, as long as the portion transduces the effector function signal. In some embodiments, a cytoplasmic domain described herein includes one or more cytoplasmic sequences of a T cell co-receptor (or fragment thereof). Non-limiting examples of such T cell co-receptors include CD27, CD28, 4-1BB (CD137), OX40, CD30, CD40, PD-1, ICOS, lymphocyte function-associated antigen-1 (LFA-1), MYD88, CD2, CD7, LIGHT, NKG2C, B7-H3, and a ligand that specifically binds with CD83.

[0168] In some embodiments, two or more signaling domains are linked to each other in a random or specified order. Optionally, a short oligo- or polypeptide linker, (e.g., between 2 and 10 amino acids in length) may form the linkage. In some embodiments, such linker is a glycine-serine doublet.

### Exemplary Antigen Binding Receptors

[0169] In some embodiments, a transmembrane and/or cytoplasmic domain is derived from a receptor tyrosine kinase (RTK). RTKs are a large and diverse family of cell surface receptors that transmit signals that trigger various physiologic responses depending on cell type and signal integration from the cell surface. Many RTKs are suitable to transmit signals in T cells, as the downstream components for signaling widely shared across cell types (Schlessinger, J. 2000. Cell Signaling by Receptor Review Tyrosine Kinases Cell 103, 211-225). The example given below is directed to PDGF receptors. These receptors are exemplary, and other receptor pairs, e.g., SCF-R and c-kit, and other heterodimeric and homodimeric receptors, can also be used.

[0170] RTKs are divided into subfamilies based on the manner in which the receptors signal in response to ligand binding. One example is the PDGFR family (Type III RTKs) that contains the two PDGF receptors (PDGFR-alpha (α) and PDGFR-beta (β)), CSF1R, KIT, RK2 and FLT3. These receptors signal upon dimerization that is induced by ligand binding—the ligands being members of the PDGF family. The receptors can signal as homodimers (αα and ββ) and as the heterodimer (αβ) (Wu E, Palmer N, Tian Z, Moseman AP, Galdzicki M, et al. (2008) Comprehensive Dissection of PDGF-PDGFR Signaling Pathways in PDGFR Genetically Defined Cells. PLoS ONE 3: e3794. doi: 10.1371/journal.pone.0003794). PDGFRs and several other TYPE III RTKs are dysregulated in some T cell malignancies, and other hematologic malignancies, illustrating their potential to signal proliferation and survival without triggering cytotoxic activity (Wadleigh M, DeAngelo D J, Griffin J D, Stone R M. 2005. After chronic myelogenous leukemia: tyrosine kinase inhibitors in other hematologic malignancies. Blood. 105, 22-30; Blood. 2010 Jan 7; 115(1): 51-60; Yang, J. et al. Platelet-derived growth factor mediates survival of leukemic large granular lymphocytes via an autocrine regulatory pathway. doi: 10.1182/blood-2009-06-223719). Importantly, mutations in PDGFRs can cause the receptors to signal in an autocrine manner, that is, independently of dimerization induced by ligand binding. This autocrine signaling is caused by mutations in the protein sequence, and has been shown to require only the transmembrane (TM) and cytoplasmic domains of the PDGFR. Thus, the PDGFR receptors are one example of RTKs useful for designing CAR-T signaling domains.

[0171] In some embodiments, a TM and/or cytoplasmic domain of PDGFRα and/or PDGFRβ, can be used as signaling domains. In one embodiment, a T cell is tranfected with nucleotide sequences encoding an scFv directed to CD19 (e.g., as can be derived from antibody FMC63) cloned in frame with nucleotide sequence encoding a TM and cytoplasmic domain of a PDGFR, e.g. PDGFRβ, with suitable linker sequences inserted between the components. The resulting CAR-T cell expresses anti-CD19 scFv as an antigen binding domain, and recognition of CD19 on cells (e.g., normal B cells or malignant B cells) induces CAR-T cell activation and proliferation, and supports cells survival, but does not induce cytotoxicity. These qualities of PDGFRβ signaling are known in T cell malignancies, and other hematologic malignancies, in which PDGFRβ is dysregulated, e.g., Chronic Myelogenous Leukemia (CML) and T cell leukemia. The binding of antigen to the antigen binding domain (scFv) induces PDGFR dimerization. In some embodiments, scFv is assessed for ability to specifically induce PDGFR dimerization, an can be determined by known signaling assays and functional assays.

[0172] In some embodiments, a consequence of CAR-T cell activation and proliferation is stimulation of specific promoters, e.g., a promoter described herein, e.g., the CD69 promoter, the CD25 promoter, the TNF promoter, the VLA1 promoter, the LFA1 promoter, and many others described herein (see, e.g., Example 9), and can lead to expression of an inducible expression construct described herein. In some embodiments, upon binding of antigen (e.g., CD19) to a first antigen binding receptor (e.g., that includes an anti-CD19 scFv as an antigen binding domain and a transmembrane and/or cytoplasmic domain of PDGFR) an inducible expression construct encoding a second antigen binding receptor is induced to be expressed. This second, induced, antigen binding receptor can bind to a tumor antigen of interest, and can include a canonical CAR-T signaling domain described herein, e.g., CD3/CD28 or CD3/4-1BB or CD3/CD28/4-1BB. Thus, such an exemplary CAR-T cell has two activities: the first is T cell activation, proliferation and survival, as induced by signaling through the first antigen binding receptor (that includes an anti-CD19 scFv as an antigen binding domain and a transmembrane and/or cytoplasmic domain of PDGFR); and the second is canonical T cell activation, proliferation, survival and anti-tumor cell cytotoxic activity, where the tumor cell is identified by the target of the induced antigen binding receptor.

[0173] In another embodiment, PDGFRa TM and cytoplasmic domains are used in place of PDGFRβ TM and cytoplasmic domains. In yet another embodiment, nucleic acid sequences encoding an anti-CD19 scFv linked to PDGFRα TM and/or cytoplasmic domains, and anti-CD19 scFv linked to PDGFRβ TM and/or cytoplasmic domains, are expressed in T cells such that a T cell expresses heterodimeric CAR constructs consisting of both the PDGFRa and PDGFRβ TM and cytoplasmic domains. Empirical analyses of CAR-mediated signaling and T cell function in response to antigen (e.g. CD19) can be used to identify appropriate PDGFR TM and cytoplasmic domains representing PDGFRα and PDGFRβ (e.g., domains that induce T cell proliferation and survival, but not cytotoxic activity, in response to antigen, e.g., as displayed on antigen-positive cells).

[0174] In another embodiment, a cytoplasmic domain of PDGFRα and/or PDGFRβ is mutagenized to enhance or reduce one or more components of downstream signaling in order to induce T cell activation, proliferation and survival, but not cytotoxic activity, in response to antigen, e.g. as displayed on antigen-positive cells. Techniques for mutagenesis and subsequent analyses are well-known and readily apparent to one skilled in the art. In another embodiment, a cytoplasmic domain of PDGFRα and/or PDGFRβ is mutagenized to enhance or reduce one or more components of downstream signaling in order to optimize induction of a specific promoter, e.g., a promoter described herein, e.g., CD69 promoter, CD25 promoter, and/or as described in Example 9.

[0175] In another embodiment, a T cell (i) expresses a first antigen binding receptor (e.g., that includes an scFv as an antigen binding domain and a transmembrane and/or cytoplasmic domain of PDGFR), where the scFv is directed to a first tumor antigen expressed on a tumor type, and (ii) upon binding of the first antigen binding receptor to the first tumor antigen, the T cell is induced to express a second antigen binding receptor that includes an scFv directed to a second tumor antigen expressed on the same tumor type. In some embodiments, the first antigen binding receptor signals T cell activation, proliferation and survival, but not cytotoxic activity, and the induced antigen binding receptor (i.e., the second antigen binding receptor) triggers cytoxicity. In some such embodiments, a T cell allows ‘antigen-gating’, whereby cytoxicity is induced only when both antigens are successfully encountered, while still promoting CAR T cell expansion and persistence. Such embodiments can be useful, e.g., where engagement of a single antigen provides an insufficient therapeutic window over normal cell (i.e., non-malignant cell) destruction and on-target toxicity. Examples of such ‘antigen pairs’ to which a first and second antigen binding receptor can be directed include, but are not limited to, CD56 and CD138, CD56 and BCMA, CD138 and BCMA (Multiple Myeloma), IL-3R (CD123) and CD33, CD123 and CLEC12A, CD33 and CLEC12A (Acute Myeloid Leukemia), CD56 and c-KIT (e.g. Small Cell Lung Cancer), CEA and PSMA, PSCA and PSMA, CEA and PSCA (Pancreatic Cancer), CA-IX and CD70 (Renal Cell Carcinoma), HER2 and EGFR, Epcam and c-MET, EGFR and IGFR (e.g. for Breast Cancer), MUC16 and Folate Receptor alpha, Mesothelin and Folate Receptor alpha (e.g. Ovarian Cancer, Mesothelioma), and many others. In some examples one might choose to target the tumor microenvironment (TME), e.g. tumor-associated macrophages (TAM) or myeloid-derived suppressor cells (MDSC) or tumor-associated fibroblasts. Examples of relevant targeting antigen pairs include but are not limited to: FAP and CD45, FAP and CSFR1, and CD45 and CSFR1.

[0176] In another embodiment, a T cell (i) expresses a first antigen binding receptor (e.g., that includes a bispecific antibody (or portion) as an antigen binding domain and a transmembrane and/or cytoplasmic domain of PDGFR), where the bispecific antibody (or portion) binds a B cell antigen (e.g., CD19) and to a tumor antigen expressed on a tumor of interest, and (ii) upon binding of the first antigen binding receptor to the first tumor antigen, the T cell is induced to express a second antigen binding receptor that includes an scFv directed to a second tumor antigen expressed on the same tumor type. In some embodiments, the first antigen binding receptor utilizes both CD19 recognition (to facilitate expansion and/or persistence) and ‘antigen-pair’ recognition to facilitate expansion, persistence and/or cytotoxicity. Examples of such ‘antigen pairs’ include but are not limited to, CD56 and CD138, CD56 and BCMA, CD138 and BCMA (Multiple Myeloma), IL-3R (CD123) and CD33 (Acute Myeloid Leukemia), CD56 and c-KIT (e.g. Small Cell Lung Cancer), CEA and PSMA, PSCA and PSMA, CEA and PSCA (Pancreatic Cancer), CA-IX and CD70 (Renal Cell Carcinoma), HER2 and EGFR, Epcam and c-MET, EGFR and IGFR (e.g. for Breast Cancer), MUC16 and Folate Receptor alpha, Mesothelin and Folate Receptor alpha (e.g. Ovarian Cancer, Mesothelioma), and many others. In some examples one might choose to target the tumor microenvironment (TME), e.g. tumor-associated macrophages (TAM) or myeloid-derived suppressor cells (MDSC) or tumor-associated fibroblasts. Examples of relevant targeting antigen pairs include but are not limited to: FAP and CD45, FAP and CSFR1, and CD45 and CSFR1.

[0177] Domains of other receptors in the Type III RTK family, e.g., CSF1R, KIT, RK2 and FLT3, can be included in antigen binding receptors described herein. The disclosure is not limited to the Type III RTK family, but is readily applied to the TM and cytoplasmic domains of other RTK families and receptors, e.g. the Epidermal growth factor receptor family, the Fibroblast growth factor receptor (FGFR) family, the Vascular endothelial growth factor receptor (VEGFR) family, the RET receptor family, the Eph receptor family, or the Discoidin domain receptor (DDR) family and many other as comprise receptors and families within the RTK families I-XVII. Constructs described herein can be modified to account for the different physiological means used within the different RTK families to trigger receptor signaling.

[0178] In some embodiments, a transmembrane and/or cytoplasmic domain is derived from one or more components of a JAK/STAT pathway. The JAK family of signaling proteins consists of JAK1, JAK3, JAK3 and TYK2. JAK proteins homodimerize and heterodimerize in order to phosphorylate STAT proteins. The STAT proteins thus propagate signaling. The STAT family consists of STATs 1-6. A regulatory form of STAT5, called STAT5b, has also been identified. Nearly all JAK/STAT combinations may be possible, although specific cell surface receptors are known to utilize subsets of JAKs and STATs when signaling.

[0179] Hematologic malignancies provide several examples of dysregulated JAK/STAT signaling cascades that can support cell proliferation and survival. The myeloid cell disorders, polycythemia vera (PV), essential thrombocythemia (ET) and primary myelofibrosis (PMF) demonstrate mutations in JAK2 signaling, which can lead to constitutive STAT3 and/or STAT5 activation. The mutations most often appear in the pseudokinase domain impacting JAK signaling and its regulation. The genotype/phenotype relationship is complex and demonstrates a gene dosage effect such that a single allele genotype generally has a different outcome that a dual allele genotype (e.g. development of ET vs PV). Both JAK2 and JAK1 have been identified as driver mutations in T cell leukemias, and activation of STAT proteins has been implicated in a variety of T cell leukemias and lymphomas. Somatic mutations in the JAK3 gene are seen in acute lymphoblastic and acute myelogenous leukemia, and in multiple myeloma and non-Hodgkin lymphoma. Oncogenic mutations in various regulatory and negative feedback pathways that control JAK/STAT signaling have also been described. These examples provide evidence of proliferative T cell activation driven by JAK/STAT pathways, albeit pathogenic activation when subjected to malignant mutations.

[0180] Many receptors are known signal through JAK/STAT complexes. Among the RTKs, the IGF-Rs, the EGFR/ErbB receptors, SCFR/cKit, BDNF, EphA4, VEGFR/Flt-1 and HGFR/c-Met preferentially utilize JAK 1 and/or 2 and various combinations of STATs 1, 3 and 5. The RTKs also induce many other signaling cascades. The hormone receptors (GHR, TpoR, EpoR, Prolactin-R) also preferentially utilize JAK 1 and/or 2 (homodimers and heterodimers) and various combinations of STATs 1, 3 and 5. The TpoR can also signal through TYK2 via a JAK2/TYK2 complex). The principal signaling pathway activated by the Prolactin-Receptor pathway is the JAK/STAT pathway. The ligand (Prolactin) binds and induces receptor dimerization and JAK2 activation. JAK2 is constitutively associated with the Prolactin receptor. JAK2 phosphorylates receptor cytoplasmic domain tyrosine residues and enables STAT protein binding and phosphorylation. Phosphorylated STATS dissociates from the receptor, dimerizes, undergoes nuclear translocation and target gene promoter activation. The prolactin receptor also signals through ZAP70, Tec, PTK2, Fyn, NF-κB and MAPK. The prolactin receptor is active in lymphocytes and this activity is associated with lymphocyte survival during activation.

[0181] Cytokine receptors of the common beta chain and common gamma chain receptor families singularly use the JAK/STAT pathways to transduce signals upon ligand (i.e. cytokine) binding. In all cases, ligand binding and receptor signaling requires the formation of a heteromeric complex between and specific alpha chain and the common (beta or gamma) chain. Within the common beta chain family (IL-3, IL-5, GM-CSF) the IL-5Ralpha/common beta chain complex signals through JAKs 1 and 2 and STATs 3 and 5, while the GM-CSF-Ralpha/common beta chain complex utilizes JAKs 1 and 2 to signal through STATs 1, 3, 5 and 6. Within the common gamma chain family (IL-2, IL-4, IL-7, IL-9, IL-13, IL-21) JAK3 is typically engaged, along with JAK1 and/or 2 and/or TYK2. As a consequence STAT signaling is varied. The related cytokine TSLP shows restricted JAK utilization, as it signals through an IL-7Ralpha/TSLP-R complex to JAKs 1 and 2, and STATs 1, 3 and 5.

[0182] The IL-6 receptor family, the IL-10 receptor family and the IL-12 receptor family all share similar features. The receptors form heteromeric complexes consisting of variously shared alpha chains (e.g. IL-20R alpha), beta chains (e.g. IL-10R beta), lambda chains (e.g. IFN-lambda-R1), or a receptor-specific chain and the gp130 coreceptor. This modularity allows for considerable variety in ligand/receptor interactions and JAK/STAT signaling. All of the receptor complexes within these three cytokine receptor families utilize JAK1 and JAK2 and TYK2, or a subset thereof, and in most cases STATs 1, 3, and 5 are the phosphorylated targets of the JAK activity, with a few exceptions. The utilization of TYK2 often engages additional STAT proteins, such as STATs 4 and 6. A very similar pattern is seen within the G-protein coupled receptors that signal through a JAK/STAT pathway (e.g. 5-HT2A, AGTR-1, various chemokine receptors).

[0183] The IL-6 receptor (IL-6R alpha/gp130) engages JAK complexes containing JAK1, JAK2, and TYK2. These in turn signal through STAT1 and STAT5. In T cells IL-6 receptor signaling fosters cell proliferation, survival, differentiation and protection from T-regulatory cell mediated suppression. The leptin receptor signals primarily through JAK2 and STAT3 and STAT5 to induce both proliferative and anti-apoptotic signaling. The leptin receptor is expressed on T cells and in that cell type it is also associated with decreased T regulatory activity. The IL-12 receptor (IL-12R-betal/IL-12beta2) is expressed on T cells and is critical for the establishment of the Th1 phenotype of CD4+ and CD8+ T cells. The IL-12 receptor activates JAK2 and TYK2. Specifically, IL-12RB1 associates with TYK2 and IL-12RB2 associates with JAK3. Upon activation JAK2 phosphorylates the tyrosine residues of STAT3 and STAT4 that then translocate to the nucleus and bind to the IFN-gamma promoter, thereby driving Th1 activity and differentiation.

[0184] In some embodiments, a TM and/or cytoplasmic domain of JAK/STAT engaging receptors are included in an antigen binding receptor described herein. In one embodiment, an scFv directed to CD19 (e.g. as can be derived from antibody FMC63) is cloned in frame with the TM and cytoplasmic domains of homodimerizing or heterodimerizing receptors having JAK/STAT engaging activities, with suitable linker sequences inserted between these components. The resulting CAR-T cell expresses anti-CD19 scFv and recognition of CD19 on cells (e.g. normal B cells or malignant B cells) induces CAR-T cell activation and proliferation, and supports cells survival, but does not induce cytotoxicity. These qualities of JAK/STAT signaling are seen in hematologic malignancies, including T cell malignancies in which JAK/STAT signaling is dysregulated. The binding of antigen to the scFv will be sufficient to induce receptor dimerization. In related embodiments, scFv will be assessed for their ability to specifically induce receptor dimerization, as monitored by signaling assays and functional assays.

[0185] In one embodiment, a TM and/or cytoplasmic domain is derived from the IL-12 receptor chains (IL-12R-betal/IL-12beta2). In another embodiment, a TM and/or cytoplasmic domain is derived from the IL-6 receptor alpha chain. In another embodiment a TM and/or cytoplasmic domain is derived from the leptin receptor. In another embodiment a TM and/or cytoplasmic domain is derived from the prolactin receptor. In another embodiment a TM and/or cytoplasmic domain is derived from a G-protein coupled receptor that engages the JAK/STAT pathway (e.g. AGTR-1. 5-HT2A, PAR, PAR3, PAR4, Bradykinin-RB2, PAFR, alpha adrenergic receptors, CXCR4, CCR2, CCR5, CCR1). In another embodiment a TM and/or cytoplasmic domain is derived from the IL-12 receptor family (e.g. IL-23R, IL-27R but not IL-35R). In another embodiment a TM and/or cytoplasmic domain is derived from the IL-10 receptor family. In another embodiment a TM and/or cytoplasmic domain is derived the IL-6 receptor family (IL-11R, CNTFR, LIFR, OSMR, GCSFR, IL-31R, CTNFR). In another embodiment a TM and/or cytoplasmic domain is derived from the gamma chain receptor family (e.g. IL-2R, IL-4R, IL-7R, IL-9R, IL-13R, IL-15R, IL-21R and the related receptor TSLPR). In another embodiment a TM and/or cytoplasmic domain is derived are derived from the beta chain receptor family e.g. (IL-3, IL-5R, GM-CSFR). In another embodiment a TM and/or cytoplasmic domain is derived from the homodimeric hormone receptor family (e.g. GHR, TpoR, EpoR). In another embodiment a TM and/or cytoplasmic domain is derived from the RTK family (e.g. Insulin-R, EGFR/ERbB receptors, PDGF receptors, SCF-R/c-Kit, M-CSFR, the FGF receptors 1-4, EphA4, TrkB, Tie2, the VEGF receptors, Mer, HGFR/c-MET). In another embodiment a TM and/or cytoplasmic domain is derived from the Type I/II interferon receptors.

[0186] It is understood that for some receptors, it may be desirable to remove one or more signaling components of receptor complex signaling while leaving interaction with JAK/STAT pathways intact. It is understood that methods to make such altered or mutated receptor chains are well-understood and readily available to one skilled in the art.

[0187] In some embodiments, a TM and/or cytoplasmic domain of a receptor that engages a JAK/STAT pathway can be used as signaling domains. In one embodiment, a T cell is tranfected with nucleotide sequences encoding an scFv directed to CD19 (e.g., as can be derived from antibody FMC63) cloned in frame with nucleotide sequence encoding a TM and cytoplasmic domain of a receptor that engages a JAK/STAT pathway, optionally with suitable linker sequences inserted between the components. The resulting CAR-T cell expresses anti-CD19 scFv as an antigen binding domain, and recognition of CD19 on cells (e.g., normal B cells or malignant B cells) induces CAR-T cell activation and proliferation, and supports cells survival, but does not induce cytotoxicity. In some embodiments, a consequence of CAR-T cell activation and proliferation is stimulation of specific promoters, e.g., the CD69 promoter, the CD25 promoter, the TNF promoter, the VLA1 promoter, the LFA1 promoter, and many others described herein (see, e.g., Example 9), and can lead to expression of an inducible expression construct described herein. In some embodiments, upon binding of antigen (e.g., CD19) to a first antigen binding receptor (e.g., that includes an anti-CD19 scFv as an antigen binding domain and a transmembrane and/or cytoplasmic domain of a receptor that engages a JAK/STAT pathway) an inducible expression construct encoding a second antigen binding receptor is induced to be expressed. This second, induced, antigen binding receptor can bind to a tumor antigen of interest, and can include a canonical CAR-T signaling domain described herein, e.g. CD3/CD28 or CD3/4-1BB or CD3/CD28/4-1BB. Thus, such an exemplary CAR-T cell has two activities: the first is T cell activation, proliferation and survival, as induced by signaling through the first antigen binding receptor (that includes an anti-CD19 scFv as an antigen binding domain and a transmembrane and/or cytoplasmic domain of a receptor that engages a JAK/STAT pathway); and the second is canonical T cell activation, proliferation, survival and anti-tumor cell cytotoxic activity, where the tumor cell is identified by the target of the induced antigen binding receptor.

[0188] In another embodiment, TM and/or cytoplasmic domains of both receptor chains (e.g., classes of alpha/beta, gamma/gamma, alpha/alpha, alpha/lambda, common beta, common gamma, gp130, and specific receptors within the families recited) are used. For example, nucleic acid sequences encoding an anti-CD19 scFv linked to such TM and/or cytoplasmic domains of different receptor chains are expressed in T cells such that a T cell expresses heterodimeric CAR constructs consisting of both receptor chains TM and cytoplasmic domains. Empirical analyses of CAR-mediated signaling and T cell function in response to antigen (e.g. CD19) can be used to identify appropriate receptor TM and cytoplasmic domains representing different receptor chains (e.g. of distinct common beta partners, or distinct gp130 partners) (e.g., domains that induce T cell proliferation and/or survival, but not cytotoxic activity, in response to antigen, e.g. as displayed on antigen-positive cells.

[0189] In another embodiment, a cytoplasmic domain of specific receptors or classes of receptor chains are mutagenized to enhance or reduce one or more components of downstream signaling in order to induce T cell activation, proliferation and/or survival, but not cytotoxic activity, in response to antigen, e.g. as displayed on antigen-positive cells. Techniques for mutagenesis and subsequent analyses are well-known and readily apparent to one skilled in the art. In another embodiment, a cytoplasmic domain of specific receptors or classes of receptor chains is mutagenized to enhance or reduce one or more components of downstream signaling in order to further optimize the induction of a specific promoter, e.g. CD69 promoter, CD25 promoter, et alia, and/or as described in Example 9.

[0190] In another embodiment, a T cell (i) expresses a first antigen binding receptor (e.g., that includes an scFv as an antigen binding domain and a transmembrane and/or cytoplasmic domain of a receptor that engages JAK/STAT), where the scFv is directed to a first tumor antigen expressed on a tumor type, and (ii) upon binding of the first antigen binding receptor to the first tumor antigen, the T cell is induced to express a second antigen binding receptor that includes an scFv directed to a second tumor antigen expressed on the same tumor type. In some embodiments, the first antigen binding receptor signals T cell activation, proliferation and/or survival, but not cytotoxic activity, and the induced antigen binding receptor (i.e., the second antigen binding receptor) triggers cytoxicity. In some such embodiments, a T cell allows ‘antigen-gating’, as described herein. This will be useful is cases where engagement of a single antigen provides an insufficient therapeutic window over normal cell (i.e. non-malignant cell) destruction and on-target toxicity. Examples of such ‘antigen pairs’ include but are not limited to, CD56 and CD138, CD56 and BCMA, CD138 and BCMA (Multiple Myeloma), IL-3R (CD123) and CD33, CD123 and CLEC12A, CD33 and CLEC12A (Acute Myeloid Leukemia), CD56 and c-KIT (e.g. Small Cell Lung Cancer), CEA and PSMA, PSCA and PSMA, CEA and PSCA (Pancreatic Cancer), CA-IX and CD70 (Renal Cell Carcinoma), HER2 and EGFR, Epcam and c-MET, EGFR and IGFR (e.g. for Breast Cancer), MUC16 and Folate Receptor alpha, Mesothelin and Folate Receptor alpha (e.g. Ovarian Cancer, Mesothelioma), and many others. In some examples one might choose to target the tumor microenvironment (TME), e.g. tumor-associated macrophages (TAM) or myeloid-derived suppressor cells (MDSC) or tumor-associated fibroblasts. Examples of relevant targeting antigen pairs include but are not limited to: FAP and CD45, FAP and CSFR1, and CD45 and CSFR1. It is understood that selection of scFv and the epitope of the scFv can be critical for successful recognition of some target antigens distinct from recognition of the CAR-T cell, in cases where the CAR-scFv-receptor for JAK/STAT construct and the antigen target overlap (e.g. ERbB/EGFR receptors). Since use of extracellular residues in the CAR-scFv-receptor for JAK/STAT construct can be limited by design, this is readily accomplished.

[0191] In another embodiment, a T cell (i) expresses a first antigen binding receptor (e.g., that includes a bispecific antibody (or portion) as an antigen binding domain and a transmembrane and/or cytoplasmic domain of a receptor that engages JAK/STAT), where the bispecific antibody (or portion) binds a B cell antigen, e.g. CD19, and to a tumor antigen expressed on a tumor of interest, and (ii) upon binding of the first antigen binding receptor to the first tumor antigen, the T cell is induced to express a second antigen binding receptor that includes an scFv directed to a second tumor antigen expressed on the same tumor type. In some embodiments, the first antigen binding receptor utilizes both CD19 recognition (to facilitate expansion and/or persistence) and ‘antigen-pair’ recognition to facilitate expansion and/or persistence and cytotoxicity. Examples of such ‘antigen pairs’ include but are not limited to, CD56 and CD138, CD56 and BCMA, CD138 and BCMA (Multiple Myeloma), IL-3R (CD123) and CD33, CD123 and CLEC12A, CD33 and CLEC12A (Acute Myeloid Leukemia), CD56 and c-KIT (e.g. Small Cell Lung Cancer), CEA and PSMA, PSCA and PSMA, CEA and PSCA (Pancreatic Cancer), CA-IX and CD70 (Renal Cell Carcinoma), HER2 and EGFR, Epcam and c-MET, EGFR and IGFR (e.g. for Breast Cancer), MUC16 and Folate Receptor alpha, Mesothelin and Folate Receptor alpha (e.g. Ovarian Cancer, Mesothelioma), and many others. In some examples one might choose to target the tumor microenvironment (TME), e.g. tumor-associated macrophages (TAM) or myeloid-derived suppressor cells (MDSC) or tumor-associated fibroblasts. Examples of relevant targeting antigen pairs include but are not limited to: FAP and CD45, FAP and CSFR1, and CD45 and CSFR1. It is understood that selection of scFv and the epitope of the scFv may be critical for successful recognition of some target antigens distinct from recognition of the CAR-T cell, in cases where the CAR-scFv-receptor for JAK/STAT construct and the antigen target overlap (e.g. ERbB/EGFR receptors). Since use of extracellular residues in the CAR-scFv-receptor for JAK/STAT construct can be limited by design, this is readily accomplished.

### Inducible Expression Constructs

[0192] In some embodiments, an “inducible expression construct” as used herein may be or comprises a nucleic acid sequence that includes at least a promoter operably linked to a nucleotide sequence of interest, e.g., a gene described herein. An inducible expression construct can comprise regulatory sequences, such as transcription and translation initiation and termination codons. In some embodiments, such regulatory sequences are specific to the type of cell into which an inducible expression construct is to be introduced, as appropriate. In some embodiments, such regulatory sequences are specific to a signaling pathway induced by a signaling domain described herein.

[0193] An inducible expression construct can comprise a native or non-native promoter operably linked to the nucleic acid encoding the gene of interest. Preferably, the promoter is functional in immune cells. Operably linking of a nucleotide sequence with a promoter is within the skill of the artisan. The promoter can be a non-viral promoter or a viral promoter, e.g., a cytomegalovirus (CMV) promoter, an SV40 promoter, an RSV promoter, or a promoter found in the long-terminal repeat of the murine stem cell virus. In some embodiments, a promoter includes an NFAT, NF-κB, AP-1 or other recognition sequence, as examples.

[0194] In some embodiments, a promoter included in an inducible expression construct described herein is an IL-2 promoter, a cell surface protein promoter (e.g., CD69 promoter), a cytokine promoter (e.g., TNF promoter), a cellular activation promoter (e.g., CTLA4, OX40, CD40L), or a cell surface adhesion protein promoter (e.g., VLA-1 promoter). The selection of a promoter, e.g., strong, weak, inducible, tissue-specific, developmental-specific, having specific kinetics of activation (e.g., early and/or late activation), and/or having specific kinetics of expression of an induced gene (e.g., short or long expression) is within the ordinary skill of the artisan. In some embodiments, a promoter mediates rapid, sustained expression, measured in days (e.g., CD69). In some embodiments, a promoter mediates delayed expression, late-inducible (e.g., VLA1). In some embodiments, a promoter mediates rapid, transient expression (e.g., TNF, immediate early response genes and many others).

[0195] Upon antigen binding by an antigen binding receptor, a signal can be transduced from a signaling domain of an antigen binding receptor described herein to an inducible expression construct, e.g., using a known pathway (see, e.g., Chow et al., Mol. Cell. Biol. 19:2300-2307 (1999); Castellanos et al., J. Immunol. 159:5463-73 (1997); Kramer et al., JBC 270:6577-6583 (1995); Gibson et al., J. Immunol. 179:3831-40 (2007)); Tsytsykova et al., J. Biol. Chem. 271:3763-70 (1996); Goldstein et al., J. Immunol. 178:201-10 (2007)). Thus, upon binding of an antigen, an antigen binding receptor activates a signal transduction pathway that leads to induction of expression (e.g., by binding of a transcription factor to a promoter described herein).

### Genes for Expression Constructs

[0196] Any gene can be included in an expression construct described herein (e.g., a constitutive expression construct or inducible expression construct), and the present disclosure is not limited to any particular gene. Exemplary, non-limiting types of genes that can be included in an expression construct include, e.g., genes encoding polypeptides (e.g., polypeptide antigens and/or therapeutic peptides), antibodies (e.g., antigen-binding fragments of antibodies and/or fusion proteins comprising an antibody or antigen-binding fragment(s)), cytokines, chemokines, cytokine receptors, chemokine receptors, toxins, agents targeting tumor microenvironment, and agents supporting immune cell growth/proliferation. In some examples a gene sequence included in an expression construct is transcribed, and then translated. In other cases, transcribed therapeutics have utility as genes, as is known for RNAi, miRNA, shRNA and other classes of regulatory RNAs, without limitation.

### 1. Expressed Polypeptides

[0197] In some embodiments, a cellular therapeutic described herein can include an expression construct (e.g., a constitutive expression construct or inducible expression construct) that encodes a polypeptide antigen (or a fragment thereof, e.g., a fragment that includes an epitope). In some embodiments, an expression construct includes a nucleotide sequence encoding a tumor antigen. Tumor antigens are known in the art and include, for example, a glioma-associated antigen, carcinoembryonic antigen (CEA), (3-human chorionic gonadotropin, alphafetoprotein (AFP), lectin-reactive AFP, thyroglobulin, RAGE-1, MN-CA IX, human telomerase reverse transcriptase, RU1, RU2 (AS), intestinal carboxyl esterase, mut hsp70-2, M-CSF, prostase, prostate-specific antigen (PSA), PAP, NY-ESO-1, LAGE-1α, p53, prostein, PSMA, Her2/neu, survivin and telomerase, prostate-carcinoma tumor antigen-1 (PCTA-1), MAGE, ELF2M, neutrophil elastase, ephrinB2, CD22, insulin growth factor (IGF)-I, IGF-II, IGF-I receptor, and mesothelin.

[0198] In some embodiments, a tumor antigen is or comprises one or more antigenic cancer epitopes associated with a malignant tumor. Malignant tumor antigens that include such epitopes include, e.g., tissue-specific antigens such as MART-1, tyrosinase and GP 100 in melanoma and prostatic acid phosphatase (PAP) and prostate-specific antigen (PSA) in prostate cancer. Other tumor antigens belong to the group of transformation-related molecules such as the oncogene HER-2/Neu/ErbB-2. Yet another group of tumor antigens are onco-fetal antigens such as carcinoembryonic antigen (CEA). In B-cell lymphoma the tumor-specific idiotype immunoglobulin constitutes a tumor-specific immunoglobulin antigen that is unique to the individual tumor. B-cell differentiation antigens such as CD19, CD20 and CD37 are other tumor antigens in B-cell lymphoma. Some of these antigens (e.g., CEA, HER-2, CD19, CD20, idiotype) have been used as targets for passive immunotherapy with monoclonal antibodies with limited success.

[0199] A tumor antigen described herein can be a tumor-specific antigen (TSA) or a tumor-associated antigen (TAA). A TSA is (or is believed to be) unique to tumor cells and does not occur on other cells in the body (e.g., does not occur to a significant extent on other cells). A TAA is not unique to a tumor cell and instead is also expressed on a normal cell (e.g., expressed under conditions that fail to induce a state of immunologic tolerance to the antigen). For example, TAAs can be antigens that are expressed on normal cells during fetal development when the immune system is immature and unable to respond, or they can be antigens that are normally present at extremely low levels on normal cells but that are expressed at higher levels on tumor cells.

[0200] Non-limiting examples of TSA or TAA antigens include differentiation antigens such as MART-1/MelanA (MART-I), gp100 (Pmel 17), tyrosinase, TRP-1, TRP-2 and tumor-specific multilineage antigens such as MAGE-1, MAGE-3, BAGE, GAGE-1, GAGE-2, p15; overexpressed embryonic antigens such as CEA; overexpressed oncogenes and mutated tumor-suppressor genes such as p53, Ras, HER-2/neu; unique tumor antigens resulting from chromosomal translocations such as BCR-ABL, E2A-PRL, H4-RET, IGH-IGK, MYL-RAR; and viral antigens, such as the Epstein Barr virus antigens EBVA and the human papillomavirus (HPV) antigens E6 and E7. Other tumor antigens include TSP-180, MAGE-4, MAGE-5, MAGE-6, RAGE, NY-ESO, erbB, p185erbB2, p180erbB-3, c-met, nm-23H1, PSA, TAG-72, CA 19-9, CA 72-4, CAM 17.1, NuMa, K-ras, beta-Catenin, CDK4, Mum-1, p 15, p 16, 43-9F, 5T4, 791Tgp72, alpha-fetoprotein, beta-HCG, BCA225, BTAA, CA 125, CA 15-3\CA 27.29\BCAA, CA 195, CA 242, CA-50, CAM43, CD68\P1, CO-029, FGF-5, G250, Ga733\EpCAM, HTgp-175, M344, MA-50, MG7-Ag, MOV18, NB/70K, NY-CO-1, RCAS1, SDCCAG16, TA-90\Mac-2 binding protein\cyclophilin C-associated protein, TAAL6, TAG72, TLP, MUC16, IL13Ra2, FRa, VEGFR2, Lewis Y, FAP, EphA2, CEACAM5, EGFR, CA6, CA9, GPNMB, EGP1, FOLR1, endothelial receptor, STEAP1, SLC44A4, Nectin-4, AGS-16, guanalyl cyclase C, MUC-1, CFC1B, integrin alpha 3 chain (of a3b1, a laminin receptor chain), and TPS.

[0201] In some embodiments, a tumor antigen is CD19, CD20, CD22, CD30, CD72, CD180, CD171 (L1CAM), CD123, CD133, CD138, CD37, CD70, CD79a, CD79b, CD56, CD74, CD166, CD71, CLL-1/CLECK12A, ROR1, Glypican 3 (GPC3), Mesothelin, CD33/IL3Ra, c-Met, PSCA, PSMA, Glycolipid F77, EGFRvIII, GD-2, MY-ESO-1, or MAGE A3. Additional tumor antigens can be identified, e.g., by sequencing tumor genomes and exomes, and/or by high-sensitivity mass spectrometry analysis of the tumor proteome, any of which can be used in methods described herein.

[0202] In some embodiments, a tumor antigen is a generic or “housekeeping” membrane protein, e.g., found on every cell. In some embodiments, a tumor antigen is a tumor stem cell marker. In some embodiments, a tumor antigen is a neoantigen (i.e., an antigen that arises in a tumor itself, e.g., because of aberrant proliferation).

[0203] In some embodiments, an expressed polypeptide is included as part of a fusion protein, e.g., a fusion protein that includes the polypeptide antigen and an antibody or antibody fragment described herein. In some embodiments, a fusion protein is or includes a polypeptide antigen fused to the amino (N) terminus of another protein, for example, a polypeptide antigen fused to the amino (N) terminus of an antigen binding protein (e.g., antibody or antibody fragment described herein, or a scaffold protein described herein (e.g., Kunitz-like domain, ankyrin repeat domain, lipoclains, Type III fibronectin domain, CD19 variant protein, or B cell specific marker variant described herein)). In some embodiments, a fusion protein is or includes a polypeptide antigen fused to the amino terminus of a light chain of an antibody, or a fragment thereof. In some embodiments, a fusion protein is or includes a polypeptide antigen fused to the amino terminus of a heavy chain of an antibody, or portion thereof.

[0204] In some embodiments, a fusion protein is or includes a polypeptide antigen fused to the carboxyl (C) terminus of another protein, for example, a polypeptide antigen fused to the carboxyl (C) terminus of an antigen binding protein (e.g., antibody or antibody fragment described herein, or a scaffold protein described herein (e.g., Type III fibronectin domain, CD19 variant protein, or B cell specific marker variant described herein)). In some embodiments, a fusion protein is or includes a polypeptide antigen fused to the carboxyl terminus of a light chain of an antibody, or a fragment thereof In some embodiments, a fusion protein is or includes a polypeptide antigen fused to the carboxyl terminus of a heavy chain of an antibody, or portion thereof.

[0205] In some embodiments, an expressed polypeptide antigen (or a fragment thereof) is expressed on the surface of the cellular therapeutic and/or is secreted by the cellular therapeutic and/or binds to the surface of a tumor cell. While any polypeptide can be expressed from an expression construct described herein, in particular embodiments, a polypeptide is selected that is a target of (e.g., binds to) an antigen-binding protein described herein (e.g., an antibody (e.g., a bispecific antibody or multi-specific antibody or fragment thereof), an antibody fusion protein or an antibody-drug conjugate). In some embodiments, the antibody or antibody fusion protein can be, e.g., a known therapeutic antibody (e.g., one that exhibits ADCC or CDC), a therapeutic fusion protein, or a therapeutic antibody-drug conjugate.

[0206] In some embodiments, a nucleic acid encoding a polypeptide antigen that binds to one or more known antibodies or antibody-drug conjugates can be included in an expression construct described herein. Various review articles have been published that describe useful anti-tumor antibodies (see, for example, Adler et al., Hematol. Oncol. Clin. North Am. 26:447-81 (2012); Li et al., Drug Discov. Ther. 7:178-84 (2013); Scott et al., Cancer Immun. 12:14 (2012); and Sliwkowski et al., Science 341:1192-1198 (2013)). Table 1 presents a non-comprehensive list of certain human polypeptide antigens targeted by known, available antibody agents, and notes certain cancer indications for which the antibody agents have been proposed to be useful:

TABLE 1

| | Antibody (commercial or | |
|---|---|---|
| Human Antigen | scientific name) | Cancer indication |
| CD2 | Siplizumab | Non-Hodgkin's Lymphoma |
| CD3 | UCHT1 | Peripheral or Cutaneous T-cell |
| CD4 | HuMax-CD4 | Lymphoma |
| CD19 | SAR3419, MEDI-551 | Diffuse Large B-cell Lymphoma |
| CD19 and CD3 or | Bispecific antibodies such as | Non-Hodgkin's Lymphoma |
| CD22 | Blinatumomab, DT2219ARL | |
| CD20 | Rituximab, Veltuzumab, | B cell malignancies (Non-Hodgkin's |
| | Tositumomab, Ofatumumab, | lymphoma, Chronic lymphocytic |
| | Ibritumomab, Obinutuzumab, | leukemia) |
| CD22 (SIGLEC2) | Inotuzumab, tetraxetan, CAT- | Chemotherapy-resistant hairy cell |
| | 8015, DCDT2980S, | leukemia, Hodgkin's lymphoma |
| | Bectumomab | |
| CD30 | Brentuximab vedotin | |
| CD33 | Gemtuzumab ozogamicin | Acute myeloid leukemia |
| | (Mylotarg) | |
| CD37 | TRU-016 | Chronic lymphocytic leukemia |
| CD38 | Daratumumab | Multiple myeloma, hematological |
| | | tumors |
| CD40 | Lucatumumab | Non-Hodgkin's lymphoma |
| CD52 | Alemtuzumab (Campath) | Chronic lymphocytic leukemia |
| CD56 (NCAM1) | Lorvotuzumab | Small Cell Lung Cancer |
| CD66e (CEA) | Labetuzumab | Breast, colon and lung tumors |
| CD70 | SGN-75 | Non-Hodgkin's lymphoma |
| CD74 | Milatuzumab | Non-Hodgkin's lymphoma |
| CD138 (SYND1) | BT062 | Multiple Myeloma |
| CD152 (CTLA-4) | Ipilimumab | Metastatic melanoma |
| CD221 (IGF1R) | AVE1642, IMC-A12, MK-0646, | Glioma, lung, breast, head and neck, |
| | R150, CP 751871 | prostate and thyroid cancer |
| CD254 (RANKL) | Denosumab | Breast and prostate carcinoma |
| CD261 (TRAILR1) | Mapatumumab | Colon, lung and pancreas tumors and |
| CD262 (TRAILR2) | HGS-ETR2, CS-1008 | haematological malignancies |
| CD326 (Epcam) | Edrecolomab, 17-1A, IGN101, | Colon and rectal cancer, malignant |
| | Catumaxomab, | ascites, epithelial tumors (breast, colon, |
| | Adecatumumab | lung) |
| CD309 (VEGFR2) | IM-2C6, CDP791 | Epithelium-derived solid tumors |
| CD319 (SLAMF7) | HuLuc63 | Multiple myeloma |
| CD340 (HER2) | Trastuzumab, Pertuzumab, | Breast cancer |
| | Ado-trastuzumab emtansine | |
| CAIX (CA9) | cG250 | Renal cell carcinoma |
| EGFR (c-erbB) | Cetuximab, Panitumumab, | Solid tumors including glioma, lung, |
| | nimotuzumab and 806 | breast, colon, and head and neck |
| | | tumors |
| EPHA3 (HEK) | KB004, IIIA4 | Lung, kidney and colon tumors, |
| | | melanoma, glioma and haematological |
| | | malignancies |
| Episialin | Epitumomab | Epithelial ovarian tumors |
| FAP | Sibrotuzumab and F19 | Colon, breast, lung, pancreas, and head |
| | | and neck tumors |
| HLA-DR beta | Apolizumab | Chronic lymphocytic leukemia, non- |
| | | Hodkin's lymphoma |
| FOLR-1 | Farletuzumab | Ovarian tumors |
| 5T4 | Anatumomab | Non-small cell lung cancer |
| GD3/GD2 | 3F8, ch14.18, KW-2871 | Neuroectodermal and epithelial tumors |
| gpA33 | huA33 | Colorectal carcinoma |
| GPNMB | Glembatumumab | Breast cancer |
| HER3 (ERBB3) | MM-121 | Breast, colon, lung, ovarian, and |
| | | prostate tumors |
| Integrin αVβ3 | Etaracizumab | Tumor vasculature |
| Integrin α5β1 | Volociximab | Tumor vasculature |
| Lewis-Y antigen | hu3S193, IgN311 | Breast, colon, lung and prostate tumors |
| MET (HGFR) | AMG 102, METMAB, | Breast, ovary and lung tumors |
| | SCH900105 | |
| Mucin-1/CanAg | Pemtumomab, oregovomab, | Breast, colon, lung and ovarian tumors |
| | Cantuzumab | |
| PSMA | ADC, J591 | Prostate Cancer |
| Phosphatidylserine | Bavituximab | Solid tumors |
| TAG-72 | Minretumomab | Breast, colon and lung tumors |
| Tenascin | 81C6 | Glioma, breast and prostate tumours |
| VEGF | Bevacizumab | Tumour vasculature |

[0207] In some embodiments, a cellular therapeutic that includes an expression construct (e.g., a constitutive expression construct or inducible expression construct) encoding one or more such polypeptide antigens is administered to a subject in combination with one or more of these (or other) known antibodies.

[0208] Antibody-drug conjugates are known and include, e.g., brentuximab vedotin (ADCETRIS®, Seattle Genetics); ado-trastuzumab emtansine (KADCYLA®, Roche); Gemtuzumab ozogamicin (Wyeth); CMC-544; SAR3419; CDX-011; PSMA-ADC; BT-062; and IMGN901 (see, e.g., Sassoon et al., Methods Mol. Biol. 1045:1-27 (2013); Bouchard et al., Bioorganic Med. Chem. Lett. 24: 5357-5363 (2014)). In some embodiments, a nucleic acid encoding a polypeptide antigen that binds to one or more of such known antibody-drug conjugates can be included in an expression construct described herein. In some such embodiments, a cellular therapeutic that includes an expression construct encoding one or more such polypeptide antigens is administered to a subject in combination with one or more of these (or other) known antibody-drug conjugates.

[0209] In some embodiments, an expressed polypeptide is included as part of a fusion protein. For example, an expression construct can encode a fusion protein comprising an expressed polypeptide described herein (e.g., a polypeptide target for an antibody, an antibody fusion protein, and/or antibody drug conjugate) and a second polypeptide (e.g., a scaffold protein described herein (e.g., Type III fibronectin domain, CD19 variant protein, or B cell specific marker variant described herein), an antibody or fragment thereof, e.g., Fab fragment, Fab′ fragment, F(ab′)₂ fragment, scFv fragment, Fv fragment, dsFv diabody, dAb fragment, Fd′ fragment, Fd fragment, CDR region, a cameloid antibody, a masked antibody (e.g., Probody®), a single chain or Tandem diabody (TandAb®), a VHH, an Anticalin®, a single-domain antibody (e.g., Nanobody®), an ankyrin repeat protein or DARPIN®, an Avimer®, an Adnectin®, an Affilin®, an Affibody®, a Fynomer®, or a Centyrin®) that targets (e.g., binds to) a tumor antigen such as a tumor antigen described herein.

[0210] One exemplary cellular therapeutic is depicted in FIG. 9. As shown in FIG. 9, an exemplary cellular therapeutic includes an antigen binding receptor, which includes an antigen binding domain (e.g., an antigen binding domain described herein) and a signaling domain (e.g., a signaling domain described herein). The cellular therapeutic also includes an inducible expression construct (e.g., an inducible expression construct described herein), which encodes an scFv-CD30 fusion protein. Upon binding of the antigen binding domain to an antigen on a tumor cell (e.g., after administration to a subject), the signaling domain induces expression of the scFv-CD30 fusion protein. The scFv portion of the fusion protein binds to a second antigen on the tumor cell, localizing CD30 (i.e., the scFv fusion partner) to the tumor cell. In this exemplary embodiment, ADCETRIS® (brentuximab vedotin; Seattle Genetics) is subsequently administered to target CD30. Upon binding to CD30 of the scFv-CD30 fusion protein (which is bound to the tumor cell), ADCETRIS® leads to killing of proliferating tumor cells.

[0211] In another embodiment, a cellular therapeutic includes a chimeric antigen receptor (CAR) on its surface, which includes an antigen binding domain (e.g., an antigen binding domain described herein) and a signaling domain (e.g., a signaling domain described herein). The cellular therapeutic also includes an inducible expression construct (e.g., an inducible expression construct described herein), which encodes CD30. Upon binding of the antigen binding domain to an antigen on a tumor cell (e.g., after administration to a subject), the signaling domain induces expression of CD30 on its surface. In this exemplary embodiment, ADCETRIS is used (e.g., administered to the subject) to target CD30 on the cellular therapeutic and, upon binding to CD30 on a surface of the cellular therapeutic, results in local killing of proliferating tumor cells.

[0212] These are a few exemplary cellular therapeutics, and do not limit the present disclosure. For example, any of the listed antigens in Table 1 can be encoded by an expression construct, either alone or as part of a fusion protein (e.g., a fusion protein that includes a polypeptide that targets a tumor antigen). Any such cellular therapeutic can be used alone or in combination with a corresponding antibody or antibody drug conjugate listed in Table 1.

[0213] In some embodiments, an expression construct (e.g., a constitutive expression construct or inducible expression construct) can encode a fusion protein comprising a polypeptide that is a target for (e.g., binds to) one or more known radioactive antibodies (e.g., a radioactive antibody used in radio-immunotherapy (RIT)) and a second polypeptide (e.g., a scaffold protein described herein (e.g., Type III fibronectin domain, CD19 variant protein, or B cell specific marker variant described herein), an antibody or fragment thereof, e.g., Fab fragment, Fab′ fragment, F(ab′)₂ fragment, scFv fragment, Fv fragment, dsFv diabody, dAb fragment, Fd′ fragment, Fd fragment, or CDR region) that targets (e.g., binds to) a tumor antigen such as a tumor antigen described herein. Radioactive antibodies are known (e.g., BEXXAR® (Corixa), ZEVALIN® (Spectrum Pharmaceuticals), Actimab-A (anti-CD33 antibody lintuzumab linked to actinium-225; Actinium Pharmaceuticals), and monoclonal antibodies with beta emitters, e.g., Lu177 (see, e.g., Nordic Nano). In addition, any antibody described herein can be linked, directly or indirectly, to a radioisotope including, e.g., beta-emitters, Auger-emitters, conversion electron-emitters, alpha-emitters, and low photon energy-emitters. Exemplary radioisotopes may include long-range beta-emitters, such as ⁹⁰Y, ³²P, ¹⁸⁶Re/¹⁸⁸Re, ¹⁶⁶Ho, ⁷⁶As/⁷⁷As, ⁸⁹Sr, ¹⁵³Sm; medium range beta-emitters, such as 131I, ¹⁷⁷Lu, ⁶⁷Cu, ¹⁶¹Tb, ¹⁰⁵Rh; low-energy beta-emitters, such as ⁴⁵Ca or ³⁵S; conversion or Auger-emitters, such as ⁵¹Cr, 67Ga, ^{99m}Tc, ¹¹¹In, ^{114m}In, ¹²³I, ¹²⁵I, ²⁰¹Tl; and alpha-emitters, such as ²¹²Bi, ²¹³Bi, ²²³Ac, ²²⁵Ac, ²¹²Pb, ²⁵⁵Fm, ²²³Ra, ¹⁴⁹Tb and ²²¹At. Suitable linkers are known in the art and include, for example, prosthetic groups, non-phenolic linkers (derivatives of N-succimidyl-benzoates; dodecaborate), chelating moieties of both macrocyclics and acyclic chelators, such as derivatives of 1,4,7,10-tetraazacyclododecane-1,4,7,10,tetraacetic acid (DOTA), derivatives of diethylenetriaminepentaacetic avid (DTPA), derivatives of S-2-(4-Isothiocyanatobenzyl)-1,4,7-triazacyclononane-1,4,7-triacetic acid (NOTA) and derivatives of 1,4,8,11-tetraazacyclodocedan-1,4,8,11-tetraacetic acid (TETA) and other chelating moieties. Radiolabeling of such antibodies is known in the art (see, e.g., Barbet et al., Methods Mol. Biol. 907:681-97 (2014); Steiner et al., Clin. Cancer Res. 17:6406 (2011); Goldenberg, J. Nucl. Med. 43:693-713 (2002)).

[0214] In some embodiments, an expression construct (e.g., a constitutive expression construct or inducible expression construct) includes a gene encoding a polypeptide antigen that is a target for one or more additional cellular therapeutics, e.g., CAR-T cells. CAR-T cells are known in the art and include CAR-T cells targeting, e.g., CD19, CD20, CD22, CD30, CD33, CD171, CD133, EphA2, estrogen receptor, progesterone receptor, EGF receptor (EGFR), EGFR mutants (e.g., EGFRvIII), CEA, GPC3, HER-2, GD2, alpha-fetoprotein (AFP), CA19-9, prostate specific antigen (PSA), and BCMA (see, e.g., Juno Therapeutics; Bellicum; Kite Pharma; Cellectis; Hillerdal et al., BioDrugs 29:75-89 (2015); Magee et al., Discov. Med. 18:265-71 (2014); Kakarla et al., Cancer J. 20:151-155 (2014)). CAR-T cells generally kill only cells expressing a particular antigen recognized by a particular type of CAR-T cell. One known problem with use of CAR-T cells involves tumor heterogeneity. Solid tumors, e.g., are characterized by heterogeneous antigen distribution. In some embodiments, methods and compositions of the disclosure increase the number and/or types of tumors that can be recognized by a particular CAR-T cell. For example, in some embodiments, an expression construct described herein expresses a target antigen for one or more known CAR-T cells. In some such embodiments, after expression of a target antigen, such target antigen is secreted from a cellular therapeutic and can bind on or near a tumor cell. Upon subsequent treatment with a CAR-T cell that targets the target antigen, such CAR-T cell binds to the expressed target antigen on or near the tumor cell. Some such methods thus allow the use of a specific CAR-T cell to target a tumor cell that it would not otherwise target (i.e., a tumor cell that does not express a relevant target antigen).

[0215] In some embodiments, a cellular therapeutic described herein can include an expression construct (e.g., a constitutive expression construct or inducible expression construct) that encodes a polypeptide target (e.g., a CAR target) for one or more additional cellular therapeutics (e.g., CAR-T). Without wishing to be bound by theory, it is believed that such an expressed polypeptide target (e.g., CAR target) can provide a targeting and/or killing advantage and/or can provide a proliferative and/or survival advantage to TIL and/or TCR T cells (e.g., resulting in differentiation of a memory T cell subset and/or a long-lived NK cell subset). A polypeptide antigen to be expressed by an expression construct described herein is not limited to any particular polypeptide or portion thereof, provided that an additional cellular therapeutic (e.g., CAR-T cell) is available and/or can be engineered to recognize and bind to such polypeptide target. In some embodiments, a polypeptide target is a polypeptide that is not a tumor-associated antigen. In some embodiments, the target is a tumor antigen described herein, e.g., CD19, CD20, CD22, ROR1, Glypican 3 (GPC3), mesothelin, CD33/IL3Ra, c-Met, PSMA, Glycolipid F77, EGFRvIII, GD-2, NY-ESO-1, or MAGE A3. In some embodiments, such a polypeptide target can be encoded by an expression construct, either alone or as part of a fusion protein (e.g., a fusion protein that includes a polypeptide that targets a tumor antigen as described herein). Any such cellular therapeutic can be used alone or in combination with a corresponding additional cellular therapeutic (e.g., CAR-T cell).

[0216] In some embodiments, an expression construct described herein encodes a fusion protein comprising (i) an antibody or antigen-binding fragment thereof that binds to a tumor antigen described herein and (ii) an “anti-idiotype” peptide that binds an antigen binding receptor of one or more additional cellular therapeutics (e.g., an scFv of a CAR-T cell). In some embodiments, an anti-idiotype peptide that binds an antigen binding receptor of one or more additional cellular therapeutics binds one or more CDRs of an antigen binding receptor (e.g., an scFv of a CAR-T cell). In some embodiments, a fusion protein includes (i) an scFv that binds a tumor antigen (as described herein) at the N-terminus and (ii) an anti-idiotype peptide that binds to an antigen binding receptor (described herein) at the C-terminus. In some embodiments, a fusion protein includes (i) an anti-idiotype peptide that binds to an antigen binding receptor (described herein) at the N-terminus, and (ii) an scFv that binds a tumor antigen (as described herein) at the C-terminus.

[0217] One of skill in the art will recognize that several methods can be used to identify peptides that bind to antibodies or fragments thereof (e.g., scFvs or CDRs). Exemplary methods include screening or panning peptide libraries. For example, peptides that bind rituximab, an anti-CD20 antibody, have been identified (Klein et al. mABs 5:1, 22-33 Jan./Feb. 2013; Philip et al. Blood. 2014 Aug. 21; 124(8):1277-87; Perosa et al. J Immunol 2007; 179: 7967-7974; Perosa et al. Blood. 2006 Feb. 1; 107(3):1070-7). In some embodiments, peptides that bind antibodies can be identified through the use of phage display libraries (see, e.g., Smith Science. 1985 Jun. 14; 228(4705):1315-7; Scott et al. Science. 1990 Jul. 27; 249(4967):386-90; Mintz et al. Nat Biotechnol. 2003 January; 21(1):57-63; Spatola et al. Anal Chem. 2013; Rojas et al. MAbs. 2014;6(6):1368-76; Wang et al. Oncotarget. 2016 Nov. 15; 7(46):75293-75306; He et al. Virology Journal 2012, 9:217; Li et al. PLoS One. 2016 May 18; 11(5):e0147361; de Oliveira-Junior et al. Biomed Res Int. 2015;2015:267989). In some embodiments, peptides that bind antibodies can be identified through screens of peptide libraries displayed on organisms other than phage (for example bacteria, see, e.g., U.S. Pat. No. 9,309,510). In some embodiments, peptides that bind antibodies can be identified through other peptide libraries, for example, soluble peptide libraries (e.g., positional scanning libraries; see, for example, Pinilla et al. Biochem J. (1994) 301, 847-853), DNA-encoded cyclic libraries, etc. Any of such peptides can be used as an “anti-idiotype” peptide in methods and constructs described herein.

[0218] In some embodiments, after being expressed, such fusion protein is secreted from a cellular therapeutic and can bind on or near a tumor cell via its anti-tumor antibody or fragment (e.g., scFv). Upon subsequent treatment with an additional cellular therapeutic (e.g., CAR-T cell), the fusion protein (bound to a tumor antigen) binds to such additional cellular therapeutic via its anti-idiotype peptide (e.g., that recognizes an antigen binding receptor of a CAR-T cell). For example, a fusion protein can include (i) an scFv that binds to a tumor antigen and (ii) an anti-idiotype peptide that binds to a B-cell specific marker binding domain (e.g., a CAR that binds CD19, CD20, CD21, CD22, CD24, CD79a, CD79b, ROR1, or BCMA) of a CAR-T cell. In some embodiments, a fusion protein can include (i) an scFv that binds to a tumor antigen and (ii) an anti-idiotype peptide that binds to an anti-CD19 scFv on a CD19 CAR-T cell.

[0219] In some embodiments, an expression construct encodes a therapeutic peptide. For example, a therapeutic peptide can block interaction of TGFβ with a TGFβ receptor, and/or block interaction of PD-1 with PD-L1. Additional therapeutic peptides are known in the art.

[0220] In some embodiments, an expression construct encodes a TLR agonist, an NK ligand, and/or an NKT ligand.

[0221] In some embodiments, an expressed polypeptide includes a signal sequence, e.g., to lead to secretion of the polypeptide from a cellular therapeutic. Signal sequences and their uses are known in the art.

[0222] In some embodiments, a constitutive expression construct encodes one or more polypeptides described herein. In some embodiments, an induced expression construct encodes one or more polypeptides described herein. In some embodiments, a polypeptide described herein can additionally or alternatively be produced and/or purified using known methods. In some embodiments, such produced and/or purified polypeptide can be used, as described herein, as a protein therapeutic.

### 2. Expressed Antibodies

[0223] In some embodiments, a cellular therapeutic includes an expression construct (e.g., a constitutive expression construct or inducible expression construct) that encodes an antibody (or fragment thereof), and/or a fusion protein comprising one or more antibodies or fragments thereof. Antibodies include, e.g., intact IgG, IgE and IgM, anti-idiotype antibodies, bi- or multi- specific antibodies (e.g., Zybodies®, etc), single chain Fvs, polypeptide-Fc fusions, Fabs, cameloid antibodies, masked antibodies (e.g., Probodies®), Small Modular ImmunoPharmaceuticals (“SMIPsTM”), single chain or Tandem diabodies (TandAb®), VHHs, Anticalins®, Nanobodies®, minibodies, BiTE®s, ankyrin repeat proteins or DARPINs®, Avimers®, a DART, a TCR-like antibody, Adnectins®, Affilins®, Trans-bodies®, Affibodies®, a TrimerX®, MicroProteins, Fynomers®, Centyrins®, and a KALBITOR®. Exemplary antibodies are listed in Table 1. In some embodiments, an antibody targets PD-1, TIM-3, LAG-3, IDO, A2AR, TGFbeta, CD47, or another protein involved in an immunosuppressive pathway. For example, an inducible expression construct can encode an antibody fragment (e.g., anti-PD1 scFv; anti-PD-L1 scFv; anti-CD39 scFv; or anti-CD73 scFv).

[0224] In some embodiments, an expression construct described herein encodes a fusion protein comprising (i) an antibody or antigen-binding fragment thereof that binds to a tumor antigen described herein and (ii) an anti-idiotype antibody or fragment that binds an antigen binding receptor of one or more additional cellular therapeutics (e.g., an scFv of a CAR-T cell). In some embodiments, a fusion protein is an “scFv/anti-idiotype scFv” fusion protein that includes (i) an scFv that binds a tumor antigen (as described herein) at the N-terminus and (ii) an anti-idiotype scFv that binds to an antigen binding receptor (described herein) at the C-terminus. In some embodiments, a fusion protein is an “anti-idiotype scFv/scFv” fusion protein that includes (i) an anti-idiotype scFv that binds to an antigen binding receptor (described herein) at the N-terminus, and (ii) an scFv that binds a tumor antigen (as described herein) at the C-terminus.

[0225] In some such embodiments, after being expressed, such fusion protein is secreted from a cellular therapeutic and can bind on or near a tumor cell via its anti-tumor antibody or fragment (e.g., scFv). Upon subsequent treatment with an additional cellular therapeutic (e.g., CAR-T cell), the fusion protein (bound to a tumor antigen) binds to such additional cellular therapeutic via its idiotope-binding protein (e.g., via its anti-idiotype antibody that recognizes an antigen binding receptor of a CAR-T cell). For example, a fusion protein can include (i) an scFv that binds to a tumor antigen and (ii) an anti-idiotype antibody (e.g., anti-idiotype scFv) that binds to a B-cell specific marker binding domain (e.g., a CAR that binds CD19, CD20, CD21, CD22, CD24, CD79a, CD79b, ROR1, or BCMA) of a CAR-T cell. In some embodiments, a fusion protein can include (i) an scFv that binds to a tumor antigen and (ii) an anti-idiotype antibody (e.g., anti-idiotype scFv) that binds to an anti-CD19 scFv on a CD19 CAR-T cell.

[0226] Anti-idiotype antibodies are specific antibodies that can bind to the CDR sequences within a specific antibody or an antibody's scFv. Anti-idiotype antibodies can be characterized by their binding. Type 1 anti-idiotype antibodies bind to the CDRs of a target antibody variable domain in such a manner as to inhibit, disrupt or neutralize the activity of the target antibody, i.e., its ability to bind antigen. Type 2 anti-idiotype antibodies bind to the CDRs of the target antibody variable domains in such a manner as to be able to bind even when the antibody is bound to antigen. Thus Type 2 antibodies are not defined by their ability to inhibit or neutralize antigen binding. A Type 3 anti-idiotype antibody only binds a target antibody when is bound to antigen.

[0227] Anti-idiotype antibodies are known in the art, and any such antibody is useful in compositions and methods described herein. One example of a specific anti-idiotype antibody specific for an antibody scFv is antibody 136.20.1, which recognizes the scFv domain of the mouse anti-human antibody FMC63 (see, e.g., Jena B, et al. (2013) Chimeric Antigen Receptor (CAR)-Specific Monoclonal Antibody to Detect CD19-Specific T Cells in Clinical Trials. PLoS ONE 8(3): e57838; US 2016/0096902). The 136.20.1 antibody and its domains (e.g., the scFv domain), have been used to detect the FMC63 VH/VL pair, or scFv, e.g., as displayed on the surface of a CAR T cell. However, the 136.20.1 antibody has not previously been presented to an FMC63-based CAR T cell as a means of triggering CAR T activity. Indeed, in the scFv or similar monovalent format, 136.20.1 antibody triggering CAR T activity would not be expected. It has been shown that 136.20.1 binds to the antigen (CD19) recognition site of FMC63, since at concentrations above 5μg/m1 136.20.1 inhibits binding of the FMC63 CART cell to CD19.

[0228] Another example is an anti-idiotype antibody that recognizes an anti-human CD22 scFv (as described in, e.g., Zhoa et al. 2014. Generation of Anti-Idiotype scFv for Pharmacokinetic Measurement in Lymphoma Patients Treated with Chimera Anti-CD22 Antibody SM03. PLoS ONE 9(5): e96697; US 2015/0175711). One such antibody is an anti-idiotype single-chain Fv (scFv) antibody specific for the murine (RFB4), chimeric (SM03) and humanized (SM06) versions of an anti-CD22 antibody that has the characteristics of a Type 1 anti-idiotypic antibody, that is, it binds specifically to the CDRs of the named anti-CD22 antibodies and inhibits the binding of the named antibodies to human CD22 protein. A Type 2 idiotypic antibody that specifically recognizes rituximab (a mouse-derived antibody to human CD20) has also been described (see Cragg et al. (2004) An anti-idiotype antibody capable of binding rituximab on the surface of lymphoma cells. Blood 104: 2540-2542).

[0229] Other examples include anti-idiotypic antibodies described by Dunn & Kehry in US 2013/0330323 A1. Other examples include myriad anti-idiotypic antibodies published and described. Other examples include novel anti-idiotypic antibodies as discovered in directed screening campaigns using the target antibody or scFv protein as immunogen or screening reagent.

[0230] In some embodiments, a cellular therapeutic includes an expression construct that encodes a fusion protein comprising an antibody (or fragment thereof) and an additional polypeptide described herein. In some embodiments, an expression construct described herein encodes a fusion protein comprising an antibody (or antigen-binding fragment thereof) and a target for one or more additional cellular therapeutics (e.g., a CAR-T target). An antibody (or fragment) can be selected to bind, e.g., to a tumor antigen (e.g., a TAA or TSA described herein), and its fusion partner can include a target for one or more additional cellular therapeutics. Such antibodies (or antigen-binding fragments) include, e.g., a monoclonal antibody (mAb), Fv, scFv, a VHH domain, a diabody, a nanobody, etc. In one example, an expression construct encodes a fusion protein of a mAb (e.g., an anti-tumor associated antigen mAb or antigen-binding fragment) and CD19 or a fragment thereof (e.g., a CD19 Ig domain). In some embodiments, an antibody (or fragment) binds to an antigen expressed on several types of cells. In some embodiments, an antibody (or fragment) binds to a tumor-selective antigen. In some embodiments, an antibody (or fragment) binds to a tumor-selective, but not specific, antigen. In some embodiments, an antibody (or fragment) binds to a tumor antigen associated with a hematologic malignancy. In some embodiments, an antibody (or fragment) binds to a tumor antigen associated with a solid tumor. In some embodiments, an antibody (or fragment) binds to one or more of CD3, CD16, CD19, CD20, CD22, CD72, CD180, ROR1, CCL-1, Glypican 3 (GPC3), mesothelin, CD33/IL3Ra, c-Met, PSMA, Glycolipid F77, EGFRvIII, GD-2, NY-ESO-1, and MAGE A3.

[0231] In some embodiments, an antibody (or fragment) binds to a B cell specific marker. In some embodiments, a B cell specific marker is a B cell antigen. In some embodiments, a B cell specific marker is a neoantigen and/or an antigen expressed by a B cell lineage cancer cell. For example, B cell specific markers include CD19, CD20, CD21, CD22, CD24, CD79a, CD79b, ROR1, and BCMA. In some embodiments, an antibody (or fragment) binds to a fragment or portion of a B cell specific marker. For example, in some embodiments, an antibody (or fragment) binds to a large extracellular loop (e.g., at least a portion of amino acids 163-187) of CD20 (see Du et al. JBC Vol. 282, NO. 20,2007, pp. 15073-15080).

[0232] Some such embodiments can be used, e.g., in combination with a cellular therapeutic, e.g., a CAR-T cell that targets a B cell specific marker (e.g., to treat a B cell tumor). Upon administration of a cellular therapeutic (e.g., a CAR-T cell) to a subject, expansion of the CAR-T cell can mediate efficacy, which in certain instances can require continuous antigen stimulation. For a CAR-T cell that targets a B cell specific marker, normal B cells in a subject can provide the antigen target for the CAR-T cell, providing CAR-T cell stimulation and expansion. However, B cells (expressing the B cell specific marker) are destroyed by the CAR-T cell along with B cell tumors expressing the same B cell specific marker. Thus, in some embodiments, an expression construct encodes a fusion protein comprising an antibody (or antigen-binding fragment thereof) and a B cell specific marker. An antibody (or fragment) can be selected to bind, e.g., to a tumor antigen (e.g., a TAA or TSA described herein), and the B cell specific marker can be a target for an additional cellular therapeutic, e.g., CAR-T cell. In some such embodiments, a fusion protein binds to a tumor antigen, and a B cell specific marker (bound to the tumor antigen) provides cell stimulation and expansion for an additional cellular therapeutic, e.g., CAR-T cell, administered to a subject.

[0233] One exemplary embodiment of a cellular therapeutic is depicted in FIG. 2. As shown in FIG. 2, a cellular therapeutic includes an antigen binding receptor on its surface, which includes an antigen binding domain (e.g., an antigen binding domain described herein) and a signaling domain (e.g., a signaling domain described herein). The cellular therapeutic also includes an inducible expression construct (e.g., an inducible expression construct described herein), which encodes an scFv-CD19 IgC domain fusion protein. Upon binding of the antigen binding domain to a first antigen on a tumor cell, the signaling domain induces expression of the scFv-CD19 IgC domain fusion protein. The scFv portion of the fusion protein binds to a second antigen on the tumor cell (e.g., a tumor-associated antigen, TAA), localizing CD19 (i.e., the scFv fusion partner) to the tumor cell. The tumor cell is thus “decorated” with CD19. An additional cellular therapeutic (e.g., a CAR-T that includes an antigen binding domain that binds to CD19) binds to CD19 of the scFv-CD19 fusion protein (which is bound to the tumor cell), and subsequently kills the CD19-“decorated” tumor cell. As depicted in FIG. 2, the induced scFv-CD19 fusion protein can also target a second tumor cell, which does not express the first antigen, allowing the CAR-T cell to bind to and kill the second tumor cell. FIG. 2 illustrates an exemplary method to overcome tumor heterogeneity with respect to expressed antigens.

[0234] In another embodiment, a cellular therapeutic includes an antigen binding receptor on its surface, which includes an antigen binding domain (e.g., an antigen binding domain described herein) and a signaling domain (e.g., a signaling domain described herein). The cellular therapeutic also includes an inducible expression construct (e.g., an inducible expression construct described herein), which encodes an scFv-scFv fusion protein. Upon binding of the antigen binding domain to a first antigen on a tumor cell, the signaling domain induces expression of the scFv-scFv fusion protein. One scFv of the fusion protein is an anti-tumor antigen scFv, and the second scFv of the fusion protein is an anti-idiotype scFv. The anti-tumor antigen scFv portion of the fusion protein binds to a second antigen on the tumor cell (e.g., a tumor-associated antigen, TAA), localizing the anti-idiotype scFv to the tumor cell. The tumor cell is thus “decorated” with the anti-idiotype scFv. An additional cellular therapeutic (e.g., a CD19 CAR-T that includes an anti-CD19 scFv) is bound by the anti-idiotype scFv portion of the fusion protein (which is bound to the tumor cell by the anti-tumor antigen scFv), and subsequently kills the anti-idiotype scFv-“decorated” tumor cell.

[0235] Another exemplary embodiment of a cellular therapeutic is depicted in FIG. 3. As shown in FIG. 3, a cellular therapeutic includes an antigen binding receptor on its surface, which includes an antigen binding domain (e.g., an antigen binding domain described herein) and a signaling domain (e.g., a signaling domain described herein). The cellular therapeutic additionally includes an inducible expression construct (e.g., an inducible expression construct described herein), which encodes an scFv-EGFR fusion protein. Upon binding of the antigen binding domain to a first antigen on a tumor cell, the signaling domain induces expression of the scFv-EGFR fusion protein. The scFv portion of the fusion protein binds to a second antigen on the tumor cell, localizing EGFR (i.e., the scFv fusion partner) to the tumor cell. The tumor cell is thus “decorated” with EGFR. An additional cellular therapeutic (e.g., a CAR-T that includes an antigen binding domain that binds to EGFR) can be used to bind to EGFR of the scFv-EGFR fusion protein (which is bound to the tumor cell), and subsequently kill the EGFR-“decorated” tumor cell.

[0236] Another exemplary cellular therapeutic is depicted in FIG. 4. As shown in FIG. 4, a cellular therapeutic includes a first antigen binding receptor on its surface, which includes a first antigen binding domain (e.g., an antigen binding domain described herein) and a signaling domain (e.g., a signaling domain described herein). The cellular therapeutic additionally includes an inducible expression construct (e.g., an inducible expression construct described herein), which encodes two proteins: (i) an scFv-CD19 fusion protein; and (ii) a CAR that includes a second antigen-binding domain (which binds CD19). Upon binding of the first antigen binding domain to a first antigen on a tumor cell, the signaling domain induces expression of the scFv-CD19 fusion protein and of the CAR. The scFv portion of the scFv-CD19 fusion protein binds to a second antigen on the tumor cell, localizing CD19 (i.e., the scFv fusion partner) to the tumor cell. The tumor cell is thus “decorated” with CD19. The cellular therapeutic subsequently binds to the CD19 of the scFv-CD19 fusion protein (which is bound to the tumor cell), mediated by expression of the CAR. Alternatively or additionally, an additional cellular therapeutic (i.e., a CAR-T that includes an antigen binding domain that binds to CD19) can be used to bind to CD19 of the scFv-CD19 fusion protein (which is bound to the tumor cell), and kill the CD19-“decorated” tumor cell.

[0237] In some embodiments, the scFv-CD19 fusion protein and the CAR can be expressed at the same time (e.g., using the same or separate promoters), or can be expressed at different times. In some embodiments, an inducible expression construct includes a first promoter to express the scFv-CD19 fusion protein, and includes a second promoter to express a second CAR. For example, a first promoter can mediate rapid expression of the scFv-CD19 fusion protein, and a second promoter can mediate delayed expression of the second CAR.

[0238] In some embodiments, a CAR includes a second signaling domain that can lead to constitutive or inducible expression of the scFv-CD19 fusion protein and/or the CAR (e.g., to “self-amplify” the cellular therapeutic). FIG. 5 depicts an exemplary cellular therapeutic that encodes a constitutively expressed CAR. As shown in FIG. 5, a cellular therapeutic includes a first antigen binding receptor on its surface, which includes a first antigen binding domain (e.g., an antigen binding domain described herein) and a signaling domain (e.g., a signaling domain described herein). The cellular therapeutic additionally constitutively expresses a CAR that includes a second antigen-binding domain (which binds CD19). The cellular therapeutic also includes an inducible expression construct (e.g., an inducible expression construct described herein), which encodes an scFv-CD19 fusion protein. Upon binding of the first antigen binding domain to a first antigen on a tumor cell, the signaling domain induces expression of the scFv-CD19 fusion protein. The scFv portion of the scFv-CD19 fusion protein binds to a second antigen on the tumor cell, localizing CD19 (i.e., the scFv fusion partner) to the tumor cell. The tumor cell is thus “decorated” with CD19. The cellular therapeutic subsequently binds to the CD19 of the scFv-CD19 fusion protein (which is bound to the tumor cell), mediated by the constitutively expressed CAR. In this embodiment, the cellular therapeutic is self-amplifying because the CAR targeting CD19 triggers release of more scFv-CD19 fusion protein. Alternatively or additionally, an additional cellular therapeutic (i.e., a CAR-T that includes an antigen binding domain that binds to CD19) can be used to bind to CD19 of the scFv-CD19 fusion protein (which is bound to the tumor cell), and kill the CD19-“decorated” tumor cell.

[0239] Another exemplary cellular therapeutic is depicted in FIG. 6. As shown in FIG. 6, a cellular therapeutic includes a first antigen binding receptor on its surface, which includes a first antigen binding domain (e.g., an antigen binding domain described herein) and a signaling domain that does not induce killing (e.g., the antigen binding receptor is not a CAR). The cellular therapeutic shown in FIG. 6 (left) additionally includes an inducible expression construct (e.g., an inducible expression construct described herein), which encodes two proteins: (i) an scFv-CD19 fusion protein; and (ii) a CAR that includes a second antigen-binding domain (which binds CD19). Upon binding of the first antigen binding domain to a first antigen on a tumor cell, the signaling domain induces expression of the scFv-CD19 fusion protein and of the CAR. The scFv portion of the scFv-CD19 fusion protein binds to a second antigen on the tumor cell, localizing CD19 (i.e., the scFv fusion partner) to the tumor cell. The tumor cell is thus “decorated” with CD19. The cellular therapeutic subsequently binds to the CD19 of the scFv-CD19 fusion protein (which is bound to the tumor cell), mediated by expression of the CAR.

[0240] The cellular therapeutic shown in FIG. 6 (right) additionally constitutively expresses a CAR that includes a second antigen-binding domain (which binds CD19) and also includes an inducible expression construct (e.g., an inducible expression construct described herein), which encodes an scFv-CD19 fusion protein. Upon binding of the first antigen binding domain to a first antigen on a tumor cell, the signaling domain induces expression of the scFv-CD19 fusion protein. The scFv portion of the scFv-CD19 fusion protein binds to a second antigen on the tumor cell, localizing CD19 (i.e., the scFv fusion partner) to the tumor cell. The tumor cell is thus “decorated” with CD19. The cellular therapeutic subsequently binds to the CD19 of the scFv-CD19 fusion protein (which is bound to the tumor cell), mediated by the constitutively expressed CAR.

[0241] FIG. 7 depicts additional exemplary cellular therapeutics that include inducible expression constructs including various genes.

[0242] Another exemplary cellular therapeutic includes an antigen binding receptor described herein and also includes an inducible expression construct (e.g., an inducible expression construct described herein), which encodes an scFv-CD19 fusion protein. The scFv portion of the fusion protein binds to a tumor antigen. Upon binding of the antigen binding domain to an antigen on a tumor cell (e.g., after administration to a subject), the signaling domain induces expression of the scFv-CD19 fusion protein. The scFv portion of the fusion protein binds to a second antigen on the tumor cell, localizing CD19 (i.e., the scFv fusion partner) to the tumor cell. In this exemplary embodiment, BLINCYTO® (blinatumomab; Amgen) is subsequently administered to target T cells to CD19 (which is bound to the tumor cell).

[0243] In some embodiments, a constitutive expression construct encodes a fusion protein or Fc-based construct described herein that includes an antigen-binding protein (that targets a B cell specific marker) fused to CD19, or a portion. In some embodiments, a constitutive expression construct encodes a B cell specific marker antibody (or portion thereof)/CD19 fusion protein, or a CD19/B-cell specific marker antibody (or portion) fusion protein. An antigen-binding protein (e.g., B-cell specific marker antibody) can bind to any known B cell specific marker, e.g., a B cell specific marker described herein (e.g., CD19, CD20, CD21, CD22, CD72, CD79a, CD79b, BCMA, or CD180). In some embodiments, a constitutive expression construct encodes an scFv/CD19 fusion protein, e.g., an anti-CD20 scFv/CD19 fusion protein or an anti-CD20 scFv/CD19 fragment fusion protein. In some embodiments, a constitutive expression construct encodes a CD19/scFv fusion protein, e.g., a CD19/anti-CD20 scFv fusion protein, or a CD19 fragment/anti-CD20 scFv fusion protein.

[0244] In some embodiments, a constitutive expression construct encodes a fusion protein or Fc-based construct described herein that includes an antigen-binding protein (that targets a B cell specific marker) fused to a B cell specific marker or portion thereof. In some embodiments, a constitutive expression construct encodes a B cell specific marker antibody (or portion thereof)/B cell specific marker (or portion) fusion protein, or a B cell specific marker (or portion)/B-cell specific marker antibody (or portion) fusion protein. In some embodiments, a constitutive expression construct encodes a fusion protein that includes (i) CD22 or portion (e.g., one or more of domains 1-3), CD79 or portion (e.g., CD79a or CD79b), and (ii) a B cell specific marker antibody or portion (e.g., an anti-CD19, CD20, CD21, CD22, CD72, CD79a, CD79b, BCMA, or CD180 scFv).

[0245] In some embodiments, a constitutive expression construct encodes a fusion protein or Fc-based construct described herein that includes an antigen-binding protein (that targets a B cell specific marker) fused to CD20 (or portion). In some embodiments, a constitutive expression construct encodes a fusion protein that includes a B cell specific marker antibody (or portion thereof) and CD20 (or portion). In some embodiments, a constitutive expression construct encodes a fusion protein that includes a B cell specific marker antibody (or portion thereof) and a portion of CD20 that is or includes an epitope of CD20 (as described in, e.g., Natarajan et al., Clin. Cancer Res. 19:6820-9 (2013)).

[0246] In some embodiments, a constitutive expression construct encodes a fusion protein or Fc-based construct described herein that includes an antigen-binding protein (that targets a TSA or TAA) and CD19, or portion. In some embodiments, a constitutive expression construct encodes an anti-TSA antibody (or portion thereof)/CD19 fusion protein, or a CD19/anti-TSA antibody (or portion) fusion protein. An anti-TSA antibody can bind to any known TSA, e.g., any TSA described herein. In some embodiments, a TSA is EGFRvIII splice variant. In some embodiments, a constitutive expression construct encodes an scFv/CD19 fusion protein, e.g., an anti-EGFRvIII scFv/CD19 fusion protein or an anti-EGFRvIII scFv/CD19 fragment fusion protein. In some embodiments, a constitutive expression construct encodes a CD19/scFv fusion protein, e.g., a CD19/anti-EGFRvIII scFv fusion protein, or a CD19 fragment/anti-EGFRvIII scFv fusion protein.

[0247] In some embodiments, a constitutive expression construct encodes a fusion protein or Fc-based construct described herein that includes an antigen-binding protein (that targets a TSA or TAA) and a B cell specific marker or portion. In some embodiments, a constitutive expression construct encodes an anti-TSA antibody (or portion thereof)/B cell specific marker fusion protein, or a B cell specific marker/anti-TSA antibody. An antigen-binding protein (e.g., anti-TSA antibody) can bind to any known TSA, e.g., any TSA described herein. In some embodiments, a TSA is EGFRvIII splice variant. In some embodiments, a constitutive expression construct encodes a fusion protein that includes (i) an anti-EGFRvIII scFv and (ii) a B cell specific marker or portion (e.g., CD20 or portion (e.g., an epitope as described in, e.g., Natarajan et al., Clin. Cancer Res. 19:6820-9 (2013), CD22 or portion (e.g., one or more of domains 1-3), CD79 or portion (e.g., CD79a or CD79b)).

[0248] In some embodiments, a constitutive expression construct encodes one or more antibodies (or fragments) described herein. In some embodiments, an inducible expression construct encodes one or more antibodies (or fragments) described herein. In some embodiments, an antibody described herein as encoded by an expression construct can additionally or alternatively be produced and/or purified using known methods. In some embodiments, such produced and/or purified antibody can be used, as described herein, as a protein therapeutic.

### 3. Expressed Cytokines

[0249] In some embodiments, an expression construct described herein (e.g., a constitutive expression construct or inducible expression construct) encodes one or more cytokines, e.g., one or more cytokines known in the art, e.g., used in cancer therapy. In some embodiments, an expression construct that encodes one or more cytokines is an inducible expression construct. In some embodiments, an expression construct that encodes one or more cytokines is a constitutive expression construct. Nonlimiting, exemplary cytokines that can be included in an expression construct include, e.g., IFNα, IFNβ, IFNγ, IL-1, IL-2, IL-7, IL-12, IL-15, IL-21, IL-36, TNF, LTα, GM-CSF, and G-CSF. Cytokines participate in immune responses by acting through various mechanisms, including recruitment of T cells toward a tumor. Nucleotide sequences encoding cytokines are known, and such nucleotide sequence can be from any animal, such as human, ape, rat, mouse, hamster, dog, or cat.

[0250] Known problems associated with cytokine therapy include, e.g., high dose requirements, toxicity, and limited efficacy. Thus, in some embodiments, an expression construct described herein is used to deliver one or more cytokines at a specific site and/or at a specific dose (e.g., to reduce or eliminate one or more risks associated with cytokine therapy). In some embodiments, an expression construct includes a promoter operably linked to a gene encoding a cytokine, and the promoter mediates rapid, sustained expression. In some embodiments, an expression construct includes a promoter operably linked to a gene encoding a cytokine, and the promoter mediates delayed, late-inducible expression. In some embodiments, an expression construct includes a promoter operably linked to a gene encoding a cytokine, and the promoter mediates rapid, transient expression.

[0251] In some embodiments, expression of a cytokine (e.g., an immunostimulatory cytokine) at or near a surface of a tumor induces an immune response to the tumor. In some embodiments, an expressed cytokine can be a target for one or more additional cellular therapeutics (e.g., one or more additional CAR-T cells). In some embodiments, expression of a cytokine near a surface of a tumor induces an immune response to the tumor and is also used as a target for one or more additional cellular therapeutics (e.g., one or more additional CAR-T cells).

[0252] For example, release of IL-21 can be used to induce expansion and/or effector differentiation of CD8+ T cells and/or support NK cell activation and cytolytic activity. In one exemplary method, a cellular therapeutic includes an expression construct that includes a CD69 promoter and a nucleic acid encoding IL-21. In some embodiments, upon binding of an antigen on a tumor cell, a cellular therapeutic described herein exhibits prolonged release of IL-21. In some embodiments, IL-21 is constitutively expressed by the cellular therapeutic after administration of the cellular therapeutic to a subject. Exemplary cellular therapeutics include, e.g., CAR-T cells, CAR-NK cells, TCR-T cells, TIL cells, allogenic NK cells, and autologous NK cells.

[0253] In another exemplary method, release of IL-15 can be used to support NK cell expansion and/or to recruit NK cells to promulgate an anti-tumor response. FIG. 8 depicts an exemplary cellular therapeutic that includes an inducible expression construct that includes a TNF promoter and a nucleic acid encoding IL-15. Upon binding of an antigen on a tumor cell, the cellular therapeutic exhibits secretion (e.g., rapid secretion) of IL-15. Exemplary cellular therapeutics include, e.g., CAR-T cells, CAR-NK cells, TCR-T cells, TIL cells, allogenic NK cells, and autologous NK cells.

[0254] In some embodiments, one or more cytokines encoded by an expression construct bind to cells at high affinity (e.g., KD of about 10⁻⁷, 10⁻⁸, 10⁻⁹, 10⁻¹⁰, 10⁻¹¹, or less) and/or have low internalization rates (e.g., less than about 10, 10², 10³, 10⁴, or 10⁵ cytokine molecules per cell per day). Binding affinity and internalization rates of various cytokines are known in the art and/or can be measured using known methods.

[0255] In some embodiments, an expression construct described herein (e.g., a constitutive expression construct or inducible expression construct) encodes a cytokine fusion protein, e.g., a fusion protein of a cytokine (e.g., an anti-tumor cytokine) and a target for one or more additional cellular therapeutics described herein (e.g., a CAR-T target). Such an expression construct can provide both a target for one or more additional cellular therapeutics (e.g., a CAR-T target) and a stimulatory cytokine at a tumor surface. For example, an expression construct can encode a cytokine-CD19 fusion protein, or a fusion of a cytokine and a CD19 fragment, e.g., a CD19 fragment to which a CD19-CAR-T cell binds. In some embodiments, a CD19 fragment is a CD19 IgC domain. Without wishing to be bound by theory, a single expression construct encoding such a fusion protein advantageously allows a cellular therapeutic to be genetically engineered using a minimal (e.g., a single) transgene.

[0256] In some embodiments, a non-inducible expression construct encodes one or more cytokines or cytokine fusion proteins described herein. In some embodiments, an inducible expression construct encodes one or more cytokines or cytokine fusion proteins described herein. In some embodiments, a cytokine fusion protein described herein as encoded by an expression construct can additionally or alternatively be produced and/or purified using known methods. In some embodiments, such produced and/or purified fusion protein can be used, as described herein, as a protein therapeutic.

### 4. Expressed Scaffold Fusion Proteins

[0257] In some embodiments, an expression construct described herein (e.g., a constitutive expression construct or inducible expression construct) encodes a fusion protein comprising one or more scaffold polypeptides (or fragments thereof). In some embodiments, an expression construct described herein (e.g., a constitutive expression construct or inducible expression construct) encodes a fusion protein comprising a scaffold polypeptide and a target for one or more additional cellular therapeutics described herein (e.g., a CAR-T target). In some embodiments, an expression construct described herein encodes a fusion protein comprising a scaffold polypeptide and an anti-idiotype antibody or fragment. In some embodiments, an expression construct described herein encodes a fusion protein comprising a scaffold polypeptide and an anti-idiotype peptide that binds an antigen binding receptor of one or more additional cellular therapeutics (e.g., an scFv of a CAR-T cell).

[0258] A scaffold polypeptide (or fragment) can be selected to bind, e.g., to a tumor antigen (e.g., a tumor antigen described herein). Such scaffold polypeptides (or fragments) include, e.g., fibronectin domain (e.g., a Type III fibronectin domain), a DARPin, an adhiron, a lipocalin/anticalin, protein A, an affibody, thioredoxin, etc. For example, an expression construct can encode a Type III fibronectin domain-CD19 fusion protein, or a fusion of a Type III fibronectin domain and a CD19 fragment, e.g., a CD19 fragment to which a CD19-CAR-T cell binds. In some embodiments, a CD19 fragment is a CD19 IgC domain. In some embodiments, an expression construct can encode a Type III fibronectin domain-anti-idiotype scFv fusion protein, where the anti-idiotype scFv binds to a CAR-T cell (e.g., an anti-CD19 scFv on the CAR-T cell). In some embodiments, an expression construct can encode a Type III fibronectin domain-anti-idiotype peptide fusion protein, where the anti-idiotype peptide binds to a CAR-T cell (e.g., an anti-CD19 scFv on the CAR-T cell).

[0259] In some embodiments, a constitutive expression construct encodes one or more scaffold fusion proteins described herein. In some embodiments, an inducible expression construct encodes one or more scaffold fusion proteins described herein. In some embodiments, a scaffold fusion protein described herein can additionally or alternatively be produced and/or purified using known methods. In some embodiments, such produced and/or purified scaffold fusion protein can be used, as described herein, as a protein therapeutic.

### 5. CD19 as a Scaffold for Expressed CD19 Variant Proteins and CD19 Variant Fusion Proteins

[0260] CD19 is a 95 kd transmembrane glycoprotein belonging to the Ig superfamily and includes two extracellular C2-type Ig domains (see, e.g., Tedder Nature Rev. Rheum. 5:572-577 (2009); Wang et al., Exp. Hematol. Oncol. 2012 Nov. 29; 1(1):36. doi: 10.1186/2162-3619-1-36.)). In some embodiments, the extracellular domain (ECD) of CD19, and/or one or both of the C2-type Ig domains are used as scaffolds for mutagenesis, and CD19 variants (e.g., CD19 or a portion thereof that include one or more mutations within the ECD and/or one or both C2-type Ig domains) can be screened and selected for binding to a target antigen (e.g., a TAA or TSA)described herein.

[0261] The nucleotide sequence of human CD19 is known (see Genbank Accession No. M84371.1). To provide variant nucleic acid sequences that encode CD19 variants that bind a particular antigen, a number of methods known in the art may be utilized. In some embodiments, a screening procedure is used that enables identification and/or isolation of nucleic acids that encode CD19 variants that bind a particular antigen. Exemplary methods include a so-called biopanning step, known from technologies such as phage display (Kang, A. S. et al. 1991. Proc Natl Acad Sci USA 88, 4363-4366), ribosome display (Schaffitzel, C. et al. 1999. J. Immunol. Methods 231, 119-135), DNA display (Cull, M. G. et al. 1992. Proc Natl Acad Sci USA 89, 1865-1869), RNA-peptide display (Roberts, R. W., Szostak, J. W., 1997. Proc Natl Acad Sci USA 94, 12297-12302), covalent display (WO 98/37186), bacterial surface display (Fuchs, P. et al. 1991. Biotechnology 9, 1369-1372), yeast surface display (Boder, E. T., Wittrup, K. D., 1997. Nat Biotechnol 15, 553-557) and eukaryotic virus display (Grabherr, R., Ernst, W., 2001. Comb. Chem. High Throughput. Screen. 4, 185-192). FACS and magnetic bead sorting are also applicable for enrichment (panning) purposes using labeled antigen. Immunodetection assays such as ELISA (Dreher, M. L. et al. 1991. J. Immunol. Methods 139, 197-205) and ELISPOT (Czerkinsky, C. C. et. al. 1983. J Immunol Methods. 65, 109-21) can also be used either following a biopanning step or alone.

[0262] Thus, in some embodiments, an expression construct described herein (e.g., a constitutive expression construct or inducible expression construct) encodes a CD19 variant (or fragment), either alone or as part of a fusion protein described herein. For example, an expression construct described herein can encode a CD19 variant (or fragment) selected to bind to a tumor antigen and which, upon expression, can bind to the tumor antigen and that itself can be a target for an additional cellular therapeutic (e.g., a CAR-T cell that binds CD19). In some embodiments, a CD19 variant (or fragment) can comprise one or more mutations, relative to wildtype CD19, within the ECD and/or one or both Ig domains. In some embodiments, an expression construct described herein encodes a CD19 variant that includes an ECD variant or a C2-type Ig domain variant selected to bind a tumor antigen. Upon expression of the CD19 variant, the ECD or C2-type Ig domain binds to the tumor antigen on a tumor cell. Subsequently, treatment with (e.g., administration to a subject of) a CAR-T cell that recognizes CD19 kills the tumor cell to which the CD19 variant is bound. An example of such a CD19 variant is depicted in FIG. 12A.

[0263] In some embodiments, an expression construct described herein encodes a CD19 variant that includes variants of both C2-type Ig domains, each of which is selected to bind a tumor antigen (e.g., different epitopes of the tumor antigen). Upon expression of the CD19 variant, the C2-type Ig domains bind to the tumor antigen on a tumor cell. Subsequently, treatment with (e.g., administration to a subject of) a CAR-T cell that recognizes CD19 kills the tumor cell to which the CD19 variant is bound. An example of such a CD19 variant is depicted in FIG. 12B.

[0264] In some embodiments, a CD19 variant selected for binding to a target antigen is included in a fusion protein. For example, a CD19 variant that includes an ECD variant or C2-type Ig domain variant selected to bind a tumor antigen can be fused to an antibody or fragment thereof that also binds to the tumor antigen (e.g., to a different epitope on the tumor antigen). Exemplary fusion proteins include, e.g., CD19 variant/scFv fusion proteins and CD19 variant/VHH fusion proteins. An expression construct described herein can encode such a CD19 variant/antibody fusion protein and upon expression, the CD19 variant and the antibody of the fusion protein bind to the tumor antigen on a tumor cell. Subsequently, treatment with (e.g., administration to a subject of) a CAR-T cell that recognizes CD19 kills the tumor cell to which the CD19 variant/antibody fusion protein is bound. An example of such a CD19 variant is depicted in FIG. 12C.

[0265] In some embodiments, a CD19 variant selected for binding to a target antigen is included in a fusion protein with an anti-idiotype antibody or fragment described herein. For example, a CD19 variant that includes an ECD variant or C2-type Ig domain variant selected to bind a tumor antigen can be fused to an anti-idiotype antibody or fragment thereof that binds to an antibody or portion on a cellular therapeutic, e.g., CAR-T cell. An expression construct described herein can encode such a CD19 variant/anti-idiotype antibody fusion protein and upon expression, the CD19 variant of the fusion protein binds to the tumor antigen on a tumor cell. Subsequently, treatment with (e.g., administration to a subject of) a CAR-T cell that expresses an antibody or fragment recognized by the anti-idiotype antibody or fragment kills the tumor cell to which the CD19 variant/anti-idiotype antibody fusion protein is bound. In some embodiments, an expression construct described herein can encode one or more CD19 variants. For example, in some embodiments, a first CD19 variant that includes an ECD variant or C2-type Ig domain variant selected to bind a tumor antigen can be fused to a second CD19 variant that includes an ECD variant or C2-type Ig domain variant selected to bind an antibody or fragment expressed on a cellular therapeutic (e.g., CAR-T cell).

[0266] In some embodiments, a CD19 variant selected for binding to a target antigen is included in a fusion protein with an anti-idiotype peptide that binds an antigen binding receptor of one or more additional cellular therapeutics as described herein. For example, a CD19 variant that includes an ECD variant or C2-type Ig domain variant selected to bind a tumor antigen can be fused to an anti-idiotype peptide that binds to an antibody or portion on a cellular therapeutic, e.g., CAR-T cell. An expression construct described herein can encode such a CD19 variant/anti-idiotype peptide fusion protein and upon expression, the CD19 variant of the fusion protein binds to the tumor antigen on a tumor cell. Subsequently, treatment with (e.g., administration to a subject of) a CAR-T cell that expresses an antibody or fragment recognized by the anti-idiotype peptide kills the tumor cell to which the CD19 variant/anti-idiotype peptide fusion protein is bound.

[0267] In some embodiments, a constitutive expression construct encodes one or more CD19 variant proteins or CD19 variant fusion proteins described herein. In some embodiments, an inducible expression construct encodes one or more CD19 variant proteins or CD19 variant fusion proteins described herein. In some embodiments, a CD19 variant protein or CD19 variant fusion protein described herein can additionally or alternatively be produced and/or purified using known methods. In some embodiments, such produced and/or purified CD19 variant protein or CD19 variant fusion protein can be used, as described herein, as a protein therapeutic.

[0268] Additional, non-limiting examples of fusion proteins that include CD19 variants (or fragment) as a scaffold include, e.g., CD19 variant/cytokine fusion proteins and CD19 variant/TLR agonist fusion proteins.

### 6. B Cell-Specific Markers and Additional Proteins as Scaffolds

[0269] In addition to CD19, other B cell specific markers belonging to the Ig superfamily can also be used as scaffolds for mutagenesis, and B cell specific marker variants can be screened and selected for binding to a target antigen described herein. In some embodiments, a B cell specific marker is CD19, CD20, CD21, CD22, CD23, CD24, CD40, CD72, CD180, ROR1, BCMA, CD79a, or CD79b (see, e.g., LeBien et al., Blood 112:1570-1580 (2008)).

[0270] For example, CD22 contains 7 Ig domains, each of which can be mutated individually or in combination with one or more other CD22 Ig domains and screened using methods described herein to bind to a tumor antigen. In some embodiments, a CD22 variant or fragment includes the first 1, 2, 3, 4, 5, 6, or all 7 Ig domains (e.g., domains 1-3). In some embodiments, a CD22 variant (or fragment) can comprise one or more mutations, relative to wildtype CD22, within each of one or more CD22 Ig domains (e.g., CD22 domains 1 and 2, or CD22 domains 1 thru 3, etc.). Thus, in some embodiments, an expression construct described herein encodes a CD22 variant (or fragment), either alone or as part of a fusion protein described herein. For example, an expression construct described herein can encode a CD22 variant (or fragment) selected to bind to a tumor agent and which, upon expression, can bind to the tumor antigen and that itself can be a target for an additional cellular therapeutic (e.g., a CAR-T cell that binds CD22). Similarly, CD79a and CD79b each consist of a single Ig domain, each of which can be mutated and screened using methods described herein to bind to a tumor antigen. Thus, in some embodiments, an expression construct described herein encodes a CD79a or CD79b variant, either alone or as part of a fusion protein described herein. For example, an expression construct described herein can encode a CD79 variant selected to bind to a tumor agent and which, upon expression, can bind to the tumor antigen and that itself can be a target for an additional cellular therapeutic (e.g., a CAR-T cell that binds CD79a or CD79b).

[0271] Additional B cell specific markers or proteins that can be used as a scaffold as described herein include the C-type lectins CD23 and CD72 (see, e.g., LeBien et al., Blood 112:1570-1580 (2008)). As a precedent, another C-type lectin tetranectin (see, e.g., Byla et al., JBC 285:12096-12100 (2010)) has been used successfully as a scaffold protein. Accordingly, in some embodiments, an expression construct described herein encodes a CD23 or CD72 variant (or fragment), either alone or as part of a fusion protein described herein. For example, an expression construct described herein can encode a fusion protein comprising a CD23 or CD72 variant (or fragment) selected to bind to a tumor antigen and which, upon expression, can bind to the tumor antigen. In some embodiments, the fusion protein can further comprise a polypeptide target for an additional cellular therapeutic (e.g., a CAR-T cell that binds the polypeptide target) or an anti-idiotype antibody or peptide that binds the antigen binding domain of a cellular therapeutic.

### 7. Expressed Toxins

[0272] In some embodiments, an expression construct described herein (e.g., a constitutive expression construct or inducible expression construct) encodes one or more toxins. In some such embodiments, an expression construct is designed such that timing of expression of the encoded toxin is controlled (e.g., producing a “smart bomb” cellular therapeutic). For example, an expression construct can include an appropriate promoter to mediate delayed expression of an encoded toxin (e.g., a VLA1 promoter), or an expression construct can include an appropriate promoter to mediate rapid and/or transient expression (e.g., a TNF promoter)).

[0273] A nucleotide sequence encoding any known protein toxin can be included in an inducible expression construct, e.g., bacterial toxins such as diphtheria toxin and plant toxins such as ricin. Additional enzymatically active toxins and fragments thereof that can be used include diphtheria A chain, nonbinding active fragments of diphtheria toxin, anthrax toxin, shiga toxin, exotoxin A chain (from Pseudomonas aeruginosa), ricin A chain, abrin A chain, modeccin A chain, alpha-sarcin, Aleurites fordii proteins, dianthin proteins, Phytolaca americana proteins (PAPI, PAPII, and PAP-S), momordica charantia inhibitor, curcin, crotin, sapaonaria officinalis inhibitor, gelonin, mitogellin, restrictocin, phenomycin, enomycin and the tricothecenes. See, for example, WO 93/21232.

[0274] In some embodiments, expression and/or delivery of a toxin to a target cell is controlled by administering or contacting a target cell with a defined number of cellular therapeutic cells that include an expression construct encoding a toxin. For example, a population of cellular therapeutic cells can be administered to a subject and/or contacted with a target cell. In some embodiments, such population includes a ratio of cellular therapeutic cells that include an expression construct and cellular therapeutic cells that do not include an expression construct. For example, a population having a ratio of expression construct—containing cellular therapeutic cells and cellular therapeutic cells lacking an expression construct of about 1:10, 1:100, 1:1000, 1:10000, 1:100000, or more, can be administered.

[0275] In some embodiments, delivery of a toxin by a cellular therapeutic induced to express a toxin can kill, e.g., 10, 50, 100, 250, 500, 750, 1000, 1500, 2000, or more cells near the vicinity of the target cell.

[0276] In some embodiments, an expression construct can include a “kill switch” in tandem with the nucleic acid encoding a toxin, to thereby stop expression of the toxin by the cellular therapeutic after a defined period of time (e.g., after 1, 2, 4, 8, 12 hours, or more). Safety “switches” can be used to turn off cellular therapeutics, e.g., when they cause life-threatening inflammation or attack normal healthy tissue. For example, such a “switch” can induce caspase 9-dependent apoptosis when a CAR T cell is exposed to rimiducid (a pill that can be given to patients if they develop life-threatening side effects; Bellicum Pharmaceuticals Inc.). Many such switches are known and in preclinical and clinical development and can be used in the context of the present disclosure (see for example Tey, 2014. Adoptive T-cell therapy: adverse events and safety switches. Clinical & Translational Immunology 3, e17; doi:10.1038/cti.2014.11).

[0277] FIG. 10 depicts an exemplary cellular therapeutic that encodes an inducibly expressed toxin (e.g., diphtheria toxin, anthrax toxin, shiga toxin). As shown in FIG. 10, a cellular therapeutic includes an antigen binding receptor on its surface, which includes an antigen binding domain (e.g., an antigen binding domain described herein) and a signaling domain (e.g., a signaling domain described herein). The cellular therapeutic also includes an inducible expression construct (e.g., an inducible expression construct described herein), which encodes diphtheria toxin. Upon binding of the antigen binding domain to an antigen on a tumor cell, the signaling domain induces expression of the diphtheria toxin, leading to cell death.

### 8. Other Expressed Genes

[0278] In some embodiments, an expression construct (e.g., a constitutive expression construct or inducible expression construct) encodes an agent that targets a tumor microenvironment. The microenvironment of certain cancers and/or tumors are known to provide protection to the tumor against cellular therapeutic attack. For example, such protective microenvironments can include an extracellular matrix (ECM) that prevents or reduces effectiveness of cellular attack, can include hypoxic and/or acidic pH conditions, and/or can include immunosuppressive signals. In some embodiments, an expression construct encodes a protein that targets and/or mediates degradation of a tumor microenvironment. Such proteins are known in the art. For example, an expression construct can encode a hyaluronidase, a heparinase, a matrix metalloproteinase (MMP), and/or an ADAM (a disintegrin and metalloproteinase, e.g., ADAMs1-20, e.g., ADAMS, ADAM10, ADAM17) (see, e.g., Edwards et al., Mol. Aspects Med. 29:258-89 (2008); Decock et al., J. Cell. Mol. Med. 15:1254-65 (2011); McAtee et al., Adv. Cancer Res. 123:1-34 (2014); Stanton et al., Biochim. Biophys. Acta 1812:1616-1629 (2011)).

[0279] FIG. 11 depicts an exemplary cellular therapeutic that encodes inducibly expressed genes. As shown in FIG. 11, a cellular therapeutic includes an antigen binding receptor on its surface, which includes an antigen binding domain (e.g., an antigen binding domain described herein) and a signaling domain (e.g., a signaling domain described herein). The cellular therapeutic also includes an inducible expression construct (e.g., an inducible expression construct described herein), which encodes a gene (e.g., a gene depicted in FIG. 11). Upon binding of the antigen binding domain to an antigen on a tumor cell, the signaling domain induces expression of gene.

[0280] In some embodiments, an inducible expression construct encodes factors for T cell and/or NK cell function and/or survival (e.g., lymphocyte expansion molecule (LEM); see, e.g., Leavy, Nat. Rev. Immunol. 15:334 (2015)).

9. Expressed Fusion Proteins with Cleavable Linkers

[0281] In some embodiments, any of the fusion proteins described herein (e.g., an scFv-CD19 fusion protein, or an scFv-scFv fusion protein) can include a linker between the fusion partners. A variety of suitable linkers and methods for preparing fusion proteins including linkers are known in the art. The linker can be cleavable, e.g., under physiological conditions., e.g., under intracellular conditions, such that cleavage of the linker releases the fusion partners. The linker can be, e.g., a peptidyl linker that is cleaved by, e.g., a plasma peptidase or protease enzyme, including, but not limited to, aminopeptidase, plasmin, and kinin-kallikrein. In some embodiments, the linker can be cleaved by a tumor associated protease, e.g., matriptase, Cathepsin B. In some embodiments, cleavage by a tumor-associated protease induces a conformational change in CD19 allowing for binding and/or expression of the CAR epitope to allow killing. In some embodiments, the peptidyl linker is at least two amino acids long or at least three amino acids long.

### 10. Expressed Fc-based Constructs

[0282] In some embodiments, an expression construct described herein (e.g., a constitutive expression construct or inducible expression construct) encodes an Fc-based construct. In some embodiments, an Fc-based construct is a CD19-Fc fusion protein, e.g., a construct depicted in FIG. 52A. As shown in FIG. 52A, a CD19-Fc fusion protein can be a dimer of two monomers, each of which includes all or part of a heavy chain Fc region of an antibody fused to an extracellular C2-type Ig domain-containing form of CD19. In some embodiments, a CD19-Fc fusion protein includes an ECD variant or one or two C2-type Ig domain variants described herein. In some embodiments, one or both of the extracellular C2-type Ig domains of CD19 are C2-type Ig domain variants described herein. In the exemplary embodiment depicted in FIG. 52A, both C2-type Ig domains are C2-type Ig domain variants (depicted with “**”). In some embodiments, such a construct both binds a tumor antigen (e.g., a TSA or TAA described herein) via one or both C2-type Ig domain variants (or ECD variant), and presents CD19 as a target for one or more additional therapeutics described herein (e.g., CART, ADC, etc.).

[0283] In some embodiments, an Fc-based construct is one schematically depicted in FIG. 52B, in which the construct is a CD19-scFv-Fc fusion protein. As shown in FIG. 52B, an exemplary construct is a heterodimer, where one monomer includes all or part of a heavy chain Fc region of an antibody fused to an scFv (e.g., an scFv described herein), and one monomer includes all or part of a heavy chain Fc region of an antibody fused to all or part of CD19. In some embodiments, such a construct binds to a tumor antigen (e.g., a TSA or TAA described herein) via the scFv, and presents CD19 as a target for one or more additional therapeutics described herein (e.g., CART, ADC, etc.).

[0284] In some embodiments, an Fc-based construct is one schematically depicted in FIG. 52C, in which the construct is a CD19-scFv-Fc fusion protein. As shown in FIG. 52C, an exemplary construct is a heterodimer, where one monomer includes all or part of a heavy chain Fc region of an antibody fused to an scFv (e.g., an scFv described herein), and one monomer includes all or part of a heavy chain Fc region of an antibody fused to an extracellular C2-type Ig domain variant described herein (depicted with “**”). In some embodiments, such a construct can be bivalent, in which the scFv and C2-type Ig domain variant (or ECD variant) bind the same target (e.g., a TSA or TAA described herein), or can be bispecific, in which the scFv and C2-type Ig domain variant bind different targets (e.g., a TSA or TAA described herein). In addition, such construct presents CD19 as a target for one or more additional therapeutics described herein (e.g., CART, ADC, etc.).

[0285] In some embodiments, an Fc-based construct is a heterodimer, where one monomer includes all or part of a heavy chain Fc region of an antibody fused to an scFv (e.g., an scFv described herein), and one monomer includes all or part of a heavy chain Fc region of an antibody fused to a second scFv (e.g., an scFv described herein). In some embodiments, an Fc-based construct is a heterodimer, where one monomer includes CH2 and CH3 regions of a heavy chain Fc region of an antibody fused to an scFv (e.g., an scFv described herein), and one monomer includes CH2 and CH3 regions of a heavy chain Fc region of an antibody fused to a second scFv (e.g., an scFv described herein). In some embodiments, an Fc-based construct is a heterodimer, where one monomer includes a CH2 region of a heavy chain Fc region of an antibody fused to an scFv (e.g., an scFv described herein), and one monomer includes a CH2 region of a heavy chain Fc region of an antibody fused to a second scFv (e.g., an scFv described herein).

[0286] In some embodiments, an Fc-based construct is a heterodimer, where one monomer includes all or part of a heavy chain Fc region of an antibody (e.g., CH2 and CH3 regions, or only CH2 region) fused to an scFv (e.g., an scFv described herein), and one monomer includes all or part of a heavy chain Fc region of an antibody (e.g., CH2 and CH3 regions, or only CH2 region) fused to an anti-idiotype scFv described herein (e.g., an anti-idiotype scFv that binds to a B-cell specific marker binding domain of an anti-B-cell specific marker antibody or fragment). In some embodiments, an Fc-based construct is a heterodimer, where one monomer includes all or part of a heavy chain Fc region of an antibody (e.g., CH2 and CH3 regions, or only CH2 region) fused to an scFv (e.g., an scFv described herein), and one monomer includes all or part of a heavy chain Fc region of an antibody (e.g., CH2 and CH3 regions, or only CH2 region) fused to an anti-idiotype peptide described herein (e.g., an anti-idiotype peptide that binds to a B-cell specific marker binding domain of an anti-B-cell specific marker antibody or fragment). In some embodiments, such a construct binds to a tumor antigen (e.g., a TSA or TAA described herein) via the scFv, and binds to an anti-B-cell specific marker antibody or fragment (e.g., a CAR of a CAR-T cell that binds CD19, CD20, CD21, CD22, CD24, CD79a, CD79b, ROR1, or BCMA) via the anti-idiotype scFv or the anti-idiotype peptide. An exemplary construct is depicted in FIG. 84A, which includes CH2 and CH3 Fc domains. Another exemplary construct is depicted in FIG. 84B, which includes CH2 Fc domains, and lacks CH3 Fc domains.

[0287] In some embodiments, an Fc-based construct is or includes a bispecific antibody or portion thereof, which binds different targets (e.g., a TSA or TAA described herein). Various bispecific antibodies are known in the art (see, e.g., Kontermann et al., Drug Disc. Today 20:838-847 (2015); Spiess et al., Mol. Immunol. 67:95-106 (2015)), and can be used in a construct described herein. Exemplary bispecific antibodies include, e.g., triomab, knobs into holes (kih) IgG, crossMab, ortho-Fab IgG, dual variable domain immunoglobulins (DVD-Ig), 2 in 1-IgG, IgG-scFv, tandem scFv, scFv₂-Fc, bi-nanobody, BiTE, tandAbs, DART, DART-Fc, scFv-HAS-scFv, dock-and-lock (DNL)-Fab3, ImmTAC, DAF, HAS body, IgG-fynomer, and ART-Ig. Additional examples include XmAb5574, XmAb5871, XmAb7195, Xtend-TNF, XmAb14045, XmAb13676, XmAb13551 (Xencor). One exemplary construct is depicted in FIG. 53A, which includes heterodimeric heavy chains, and where one arm of the construct includes a VH/VL and the other arm includes an scFv fused to the Fc region. In some embodiments, a construct depicted in FIG. 53A is monovalent, where the VH/VL arm binds a tumor antigen (e.g., a TSA or TAA described herein), and the scFv binds a T cell antigen described herein (e.g., CD3). Another exemplary construct is depicted in FIG. 53B, in which the scFv of the construct depicted in FIG. 53A is replaced with one or two extracellular C2-type Ig domains of CD19. In addition, the construct depicted in FIG. 53B presents CD19 as a target for one or more additional therapeutics described herein (e.g., CART, ADC, etc.). Another exemplary construct is depicted in FIG. 53C, in which one or both extracellular C2-type Ig domains of CD19 are C2-type Ig domain variants described herein (depicted with “**”). In some embodiments, such a construct can be bivalent, in which the VH/VL and C2-type Ig domain variant (or ECD variant) bind the same target (e.g., a TSA or TAA described herein), or can be bispecific, in which the VH/VL and C2-type Ig domain variant (or ECD variant) bind different targets (e.g., a TSA or TAA described herein). In addition, such construct depicted in FIG. 53C presents CD19 as a target for one or more additional therapeutics described herein (e.g., CART, ADC, etc.). In some embodiments, an Fc-based construct is or includes heterodimeric heavy chains, and where one arm of the construct includes a VH/VL that binds a tumor antigen (e.g., a TSA or TAA described herein) and the other arm includes an anti-idiotype scFv described herein fused to the Fc region. In some embodiments, an Fc-based construct is or includes heterodimeric heavy chains, and where one arm of the construct includes a VH/VL that binds a tumor antigen (e.g., a TSA or TAA described herein) and the other arm includes an anti-idiotype peptide described herein fused to the Fc region.

[0288] In some embodiments, an Fc-based construct is or includes heterodimeric heavy chains, and where one arm of the construct includes an scFv (e.g., an scFv described herein) and the other arm includes a second scFv (e.g., an scFv described herein).

[0289] In some embodiments, an Fc-based construct includes an Fc Ig “swap”. FIG. 54A schematically depicts an antibody in which each Fc heavy chain includes two Ig constant domains, one called CH2 (blue) and the other called CH3 (red). In some embodiments, an Fc-based construct includes an antibody as depicted in FIG. 54B, which includes one or two heavy chains that include CH2 (blue) fused to one or more extracellular C2-type Ig domains of CD19 described herein, one or more Ig domains of CD22 described herein, and/or one or more Ig domains of CD79a or CD79b described herein (depicted green in FIG. 54B).

[0290] In some embodiments, an Fc-based construct includes a fusion protein (as described herein) and that includes an Ig constant domain, or a Type III fibronectin domain, and one or more “loops” of an extracellular C2-type Ig domains of CD19 described herein. The structure of extracellular C2-type Ig domains of CD19 are known to include three “loops”. One exemplary construct is depicted in FIG. 55A, in which a loop in one or both Fc CH3 domains is replaced with a loop of extracellular C2-type Ig domain of CD19. Another exemplary construct is depicted in FIG. 55B, in which 1, 2, or 3 loops of extracellular C2-type Ig domain of CD19 are grafted onto VH, Type III fibronectin domain, or scFv.

[0291] In some embodiments, a constitutive expression construct encodes one or more Fc-based constructs described herein. In some embodiments, an inducible expression construct encodes one or more Fc-based constructs described herein. In some embodiments, an Fc-based construct described herein can additionally or alternatively be produced and/or purified using known methods. In some embodiments, such produced and/or purified Fc-based constructs can be used, as described herein, as a protein therapeutic.

11. Expressed Polypeptides with Inducible Function

[0292] In some embodiments, an expression construct described herein (e.g., a constitutive expression construct or inducible expression construct) encodes one or more polypeptides, which exhibit one or more inducible functions. In some embodiments, a polypeptide is or comprises, e.g., an antibody or enzyme, of which one or more functions is reversibly reduced, blocked or inhibited, and whose function can be induced, e.g., by unblocking or disinhibition. A variety of polypeptides with inducible function are known in the art and include, e.g., polypeptides that include ligand binding sites (e.g., hormone binding domain inducible function (see, for example, Eilers et al. Nature 340, 66-68 1989) or masked polypeptides (e.g., antibodies, enzymes). In some embodiments, an inducible function is inducible binding of a target antigen (e.g., a TAA or TSA described herein).

### Masked Constructs

[0293] In some embodiments, an expressed polypeptide is or includes a masked version of an antigen-binding protein described herein (e.g., antibody or antibody fragment described herein, or a scaffold protein described herein (e.g., Type III fibronectin domain, CD19 variant protein, or B cell specific marker variant described herein)). In some embodiments, an expressed polypeptide includes a masked version of an antibody or antibody fragment described herein (e.g., a Probody® as described in, e.g., Sandersjoo et al. Cell. Mol. Life Sci. (2015) 72:1405-1415; US 2015/0183875; U.S. Pat. Nos. 8,513,390; and 9,120,853). In some embodiments, a masked construct comprises an antibody, or fragment thereof, or a scaffold protein described herein (e.g., Type III fibronectin domain, CD19 variant protein, or B cell specific marker variant described herein), a masking moiety, a cleavable moiety, and/or a linker. In some embodiments, a masked construct includes an antigen-binding protein that targets one or more TSA described herein. In some embodiments, a masked construct includes an antigen-binding protein that targets one or more TAA described herein. In some embodiments, a masked construct includes an antigen-binding protein that targets one or more TSA and one or more TAA described herein. In some embodiments, an induced expression construct encodes one or more masked constructs. In some embodiments, a constitutive expression construct encodes one or more masked constructs.

[0294] In some embodiments, a masked construct comprises an antigen-binding protein (e.g., antibody, or fragment thereof, or a scaffold protein described herein (e.g., Type III fibronectin domain, CD19 variant protein, or B cell specific marker variant described herein)), and a masking moiety. In some embodiments, a masking moiety is an amino acid sequence coupled to the antigen-binding protein, and positioned such that it reduces the protein's ability to specifically bind its target (“masking” the antigen-binding protein). In some embodiments, a masking moiety is coupled to the antigen-binding protein by way of a linker. In some embodiments, specific binding of a masked antigen-binding protein, to its target is reduced or inhibited, as compared to the specific binding of an “unmasked” antigen-binding protein, or as compared to the specific binding of the parental antigen-binding protein, to the target. In some embodiments, a masked antigen-binding protein demonstrates no measurable binding or substantially no measurable binding to the target, and/or demonstrates no more than 0.001%, 0.01%, 0.1%, 1%, 2%, 3%, 4%, 5%, 6%, 7%, 8%, 9%, 10%, 15%, 20%, 25%, 30%, 35%, 40%, or 50% binding to the target, as compared to the binding of an unmasked antigen-binding protein, or as compared to the binding of the parental antigen-binding protein to the target, e.g., for at least 2, 4, 6, 8, 12, 28, 24, 30, 36, 48, 60, 72, 84, 96 hours, or 5, 10, 15, 30, 45, 60, 90, 120, 150, 180 days, or 1, 2, 3, 4, 5, 6, 7, 8, 9, 10, 11, 12 months or greater, e.g., when measured in vivo or in a Target Displacement in vitro immunoabsorbent assay (described in U.S. Pat. No. 8,513,390).

[0295] In some embodiments, specific binding of a masked antigen-binding protein to its target is reduced or inhibited, as compared to specific binding of the unmasked antigen-binding protein, or as compared to the specific binding of the parental antigen-binding protein to the target. The K_{d} of the masked antigen-binding protein towards the target can be at least 5, 10, 25, 50, 100, 250, 500, 1,000, 2,500, 5,000, 10,000, 50,000, 100,000, 500,000, 1,000,000, 5,000,000, 10,000,000, 50,000,000 or greater, or between 5-10, 10-100, 10-1,000, 10-10,000, 10-100,000, 10-1,000,000, 10-10,000,000, 100-1,000, 100-10,000, 100-100,000, 100-1,000,000, 100-10,000,000, 1,000-10,000, 1,000-100,000, 1,000-1,000,000, 1000-10,000,000, 10,000-100,000, 10,000-1,000,000, 10,000-10,000,000, 100,000-1,000,000, or 100,000-10,000,000 times greater than that of the unmasked antigen-binding protein, or than that of the parental antigen-binding protein. Conversely, the binding affinity of the masked antigen-binding protein towards the target can be at least 5, 10, 25, 50, 100, 250, 500, 1,000, 2,500, 5,000, 10,000, 50,000, 100,000, 500,000, 1,000,000, 5,000,000, 10,000,000, 50,000,000 or greater, or between 5-10, 10-100, 10-1,000, 10-10,000, 10-100,000, 10-1,000,000, 10-10,000,000, 100-1,000, 100-10,000, 100-100,000, 100-1,000,000, 100-10,000,000, 1,000-10,000, 1,000-100,000, 1,000-1,000,000, 1000-10,000,000, 10,000-100,000, 10,000-1,000,000, 10,000-10,000,000, 100,000-1,000,000, or 100,000-10,000,000 times lower than that of the unmasked antigen-binding protein, or than that of the parental antigen-binding protein.

[0296] Masking moieties are known in the art and include, e.g., known binding partners of antibodies, or fragments thereof. In some embodiments, a masking moiety is an amino acid sequence at the N-terminus, at the C-terminus, and/or within an internal site (e.g., an antigen binding loop) of the antigen-binding protein. In some embodiments, a masking moiety is or includes one or more pairs of cysteine residues, e.g., resulting in formation of a disulfide bond between cysteine pairs. In some such embodiments, disulfide bonds result in a conformationally constrained structure, which can be “unmasked” by cleavage of the disulfide bond by, e.g., a reducing agent. Exemplary masking moieties are described in, e.g., Sandersjoo et al. Cell. Mol. Life Sci. (2015) 72:1405-1415; US 2015/0183875; U.S. Pat. Nos. 8,513,390; and 9,120,853.

[0297] In some embodiments, an expressed polypeptide is an antibody fusion protein described herein that includes a masking moiety. For example, an expressed polypeptide can be an antibody fusion protein that includes (i) an antibody or fragment (e.g., scFv) that binds to a tumor antigen, where the antibody or fragment (e.g., scFv) includes a masking moiety, and (ii) a B-cell specific marker (e.g., CD19, CD20, CD21, CD22, CD24, CD79a, CD79b, ROR1, or BCMA).

[0298] In some embodiments, an expressed polypeptide is an antibody fusion protein described herein that includes a masking moiety, e.g., a masked scFv-CD19 or masked CD19-scFv fusion protein described herein. In some embodiments, a masked scFv-CD19 fusion protein includes a masking moiety at the N-terminus of the fusion protein. In some embodiments, a masked scFv-CD19 fusion protein includes a masking moiety at the C-terminus of the fusion protein. In some embodiments, a masked CD19-scFv fusion protein includes a masking moiety at the N-terminus of the fusion protein. In some embodiments, a masked CD19-scFv fusion protein includes a masking moiety at the C-terminus of the fusion protein.

[0299] In some embodiments, an expressed polypeptide is a masked fusion protein that includes an scFv described herein at the N-terminus and a fragment of CD19 at the C-terminus (an scFv-CD19 fragment fusion protein), or a masked fusion protein that includes a fragment of CD19 at the N-terminus and an scFv described herein at the C-terminus (a CD19 fragment-scFv fusion protein). In some embodiments, a masked scFv-CD19 fragment fusion protein includes a masking moiety at the N-terminus of the fusion protein. In some embodiments, a masked scFv-CD19 fragment fusion protein includes a masking moiety at the C-terminus of the fusion protein. In some embodiments, a masked CD19 fragment-scFv fusion protein includes a masking moiety at the N-terminus of the fusion protein. In some embodiments, a masked CD19 fragment-scFv fusion protein includes a masking moiety at the C-terminus of the fusion protein.

[0300] In some embodiments, an expressed polypeptide is an antibody fusion protein that includes one or more masking moieties and also includes (i) an antibody or fragment (e.g., scFv) that binds to a tumor antigen, and (ii) an anti-idiotype antibody (e.g., anti-idiotype scFv) that binds to a B-cell specific marker binding domain of an anti-B-cell specific marker antibody (e.g., a CAR of a CAR-T cell that binds CD19, CD20, CD21, CD22, CD24, CD79a, CD79b, ROR1, or BCMA). In some embodiments, such fusion protein includes a masking moiety that masks binding of an scFv to a tumor antigen. In some embodiments, such fusion protein includes a masking moiety that masks binding of an anti-idiotype scFv to an anti-B cell specific marker antibody or fragment described herein. In some embodiments, such fusion protein includes a masking moiety that masks binding of an scFv to a tumor antigen and includes a masking moiety that masks binding of an anti-idiotype scFc to an anti-B cell specific marker antibody or fragment described herein.

[0301] In some embodiments, a “masked scFv/anti-idiotype scFv” includes a masking moiety at the N-terminus of an scFv/anti-idiotype scFv fusion protein described herein. In some embodiments, a “masked scFv/anti-idiotype scFv” includes a masking moiety at the C-terminus of an scFv/anti-idiotype scFv fusion protein described herein. In some embodiments, a “masked anti-idiotype scFv/scFv” includes a masking moiety at the N-terminus of an anti-idiotype scFv/scFv fusion protein described herein. In some embodiments, a “masked anti-idiotype scFv/scFv” includes a masking moiety at the C-terminus of an anti-idiotype scFv/scFv fusion protein described herein. In some embodiments, a “masked scFv/masked anti-idiotype scFv” includes a masking moiety at the N-terminus of an scFv/anti-idiotype scFv fusion protein described herein and includes a masking moiety at the C-terminus of an scFv/anti-idiotype scFv fusion protein described herein. In some embodiments, a “masked anti-idiotype scFv/masked scFv” includes a masking moiety at the N-terminus of an anti-idiotype scFv/scFv fusion protein described herein and includes a masking moiety at the C-terminus of an anti-idiotype scFv/scFv fusion protein described herein. One exemplary construct is depicted in FIG. 84C, where the masking moiety is present on the N-terminus of the scFv.

[0302] In some embodiments, an expressed polypeptide is an antibody fusion protein described herein that includes (i) a masking moiety, (ii) an scFv that binds a tumor antigen described herein, and (iii) an anti-idiotype scFv that binds to an anti-CD19 antibody or fragment (e.g., an anti-CD19 antibody or fragment of a CAR, e.g., an anti-CD19 scFv). In some embodiments, an expressed polypeptide is a masked scFv/anti-idiotype scFv fusion protein that includes (i) an scFv that binds a tumor antigen (as described herein) at the N-terminus and (ii) an anti-idiotype scFv that binds to an anti-CD19 antibody or fragment at the C-terminus. In some embodiments, a masked scFv/anti-idiotype scFv fusion protein includes a masking moiety at the N-terminus of the fusion protein. In some embodiments, a masked scFv/anti-idiotype scFv fusion protein includes a masking moiety at the C-terminus of the fusion protein. In some embodiments, an expressed polypeptide is a masked anti-idiotype scFv/scFv fusion protein that includes (i) an anti-idiotype scFv that binds to an anti-CD19 antibody or fragment at the N-terminus and (ii) an scFv that binds a tumor antigen at the C-terminus. In some embodiments, a masked anti-idiotype scFv/scFv fusion protein includes a masking moiety at the N-terminus of the fusion protein. In some embodiments, a masked anti-idiotype scFv/scFv fusion protein includes a masking moiety at the C-terminus of the fusion protein.

[0303] In some embodiments, an expressed polypeptide is or includes a masked antibody (or fragment thereof) known in the art, including but not limited to, a masked version of cetuximab, panitumumab, infliximab, adalimumab, efalizumab, ipilimumab, tremelimumab, adecatumumab, Hu5c8, alemtuzumab, ranibizumab, tositumomab, ibritumomab tiuxetan, rituximab, infliximab, bevacizumab, or figitumumab, or a fragment thereof (e.g., a masked scFv fragment). Additional antibodies that can be masked are described in, e.g., U.S. Pat. Nos. 8,513,390, 9,120,853, 9,127,053, US 20150183875, US 20140363430, US 20140045195, US20130101555, and US 20100189651.

[0304] In some embodiments, an expressed polypeptide is an antibody fusion protein that includes one or more masking moieties and also includes (i) an antibody or fragment (e.g., scFv) that binds to a tumor antigen, and (ii) an anti-idiotype peptide that binds to a B-cell specific marker binding domain of an anti-B-cell specific marker antibody (e.g., a CAR of a CAR-T cell that binds CD19, CD20, CD21, CD22, CD24, CD79a, CD79b, ROR1, or BCMA). In some embodiments, such fusion protein includes a masking moiety that masks binding of an scFv to a tumor antigen. In some embodiments, a “masked scFv/anti-idiotype peptide” includes a masking moiety at the N-terminus of an scFv/anti-idiotype peptide fusion protein described herein. In some embodiments, a “masked scFv/anti-idiotype peptide” includes a masking moiety at the C-terminus of an scFv/anti-idiotype peptide fusion protein described herein.

[0305] In some embodiments, an expressed polypeptide is an antibody fusion protein described herein that includes (i) a masking moiety, (ii) an scFv that binds a tumor antigen described herein, and (iii) an anti-idiotype peptide that binds to an anti-CD19 antibody or fragment (e.g., an anti-CD19 antibody or fragment of a CAR, e.g., an anti-CD19 scFv). In some embodiments, an expressed polypeptide is a masked scFv/anti-idiotype peptide fusion protein that includes (i) an scFv that binds a tumor antigen (as described herein) at the N-terminus and (ii) an anti-idiotype peptide that binds to an anti-CD19 antibody or fragment at the C-terminus.

[0306] In some embodiments, a masked scFv/anti-idiotype peptide fusion protein includes a masking moiety at the N-terminus of the fusion protein. In some embodiments, a masked scFv/anti-idiotype peptide fusion protein includes a masking moiety at the C-terminus of the fusion protein.

[0307] In some embodiments, a masked antibody or fusion protein additionally includes one or more cleavable moieties. In some embodiments, a cleavable moiety is or includes, e.g., one or more amino acid sequences that can serve as a substrate for one or more proteases, such as one or more extracellular proteases. In some embodiments, a cleavable moiety is or includes a cysteine-cysteine pair capable of forming a disulfide bond, which can be cleaved by action of a reducing agent. In other embodiments, a cleavable moiety is or includes a substrate capable of being cleaved upon photolysis.

[0308] In some embodiments, a cleavable moiety is selected based on presence of a protease in or in proximity to tissue with a desired target of an antibody, or fragment thereof In some embodiments, target tissue is a cancerous tissue. Proteases having substrates in a number of cancers, e.g., solid tumors, are known in the art (see, e.g., La Rocca et al, (2004) British J. of Cancer 90(7): 1414-1421). In some embodiments, a cleavable moiety is or includes a target for, e.g., legumain, plasmin, TMPRSS-3/4, MMP-9, MT1-MMP, ADAM (a disintegrin and metalloproteinase, e.g., ADAMs1-20, e.g., ADAMS, ADAM10, ADAM17), cathepsin (e.g., cathepsin A, B, C, D, E, F, G, H, L, K, 0, S, V, or W (Tan et al., World J. Biol. Chem. 4:91-101 (2013)), caspase, human neutrophil elastase, beta-secretase, matriptase, uPA, or PSA.

[0309] In some embodiments, a masked construct described herein includes a linker, e.g., C-terminal and/or N-terminal to a masking moiety and/or cleavage moiety. In some embodiments, a linker may provide flexibility for the masking moiety to reversibly inhibit binding of the antigen-binding protein to its target. Suitable linkers can be readily selected and can be of any of a suitable of different lengths, such as from 1 amino acid (e.g., Gly) to 20 amino acids, from 2 amino acids to 15 amino acids, from 3 amino acids to 12 amino acids, including 4 amino acids to 10 amino acids, 5 amino acids to 9 amino acids, 6 amino acids to 8 amino acids, or 7 amino acids to 8 amino acids, and may be 1, 2, 3, 4, 5, 6, or 7 amino acids. In some embodiments, a masking moiety is fused to an antigen-binding protein through a polypeptide linker. In some embodiments, a linker used to fuse a masking moiety to an antigen-binding protein is a cleavable moiety described herein. In some embodiments a masking moiety is fused, directly or by linker, to the N-terminus of an antigen-binding protein. In some embodiments a masking moiety is fused, directly or by linker, to the C-terminus of an antigen-binding protein.

[0310] A masked construct can include any expressed polypeptide described herein. One set of exemplary masked constructs is depicted in FIG. 56, which shows fusion of a masking moiety to constructs described in FIGS. 52B and 52C. In some embodiments, as depicted in FIG. 56, a masking moiety can be fused to the N-terminus of the scFv. Another exemplary set of masked constructs is depicted in FIG. 57, which shows fusion of a masking moiety to constructs described in FIGS. 53B and 53C. In some embodiments, as depicted in FIG. 57, a masking moiety can be fused to the N-terminus of the VH and/or VL on the VH/VL arm. Another exemplary set of masked constructs is depicted in FIG. 58, which shows fusion of a masking moiety to construct described in FIG. 54B. In some embodiments, as depicted in FIG. 58, a masking moiety can be fused to the N-terminus of each heavy chain, which each includes CH2 (blue) fused to one or more extracellular C2-type Ig domains of CD19 described herein, one or more Ig domains of CD22 described herein, and/or an Ig domain of CD79a or CD79b described herein (depicted green). In some embodiments, a masking moiety can be fused to the N-terminus of one or both heavy chains. Additionally or alternatively, in some embodiments, a masking moiety can be fused to the N-terminus of one or both light chains. An additional exemplary masked construct is depicted in FIG. 59, which shows fusion of a masking moiety to constructs described in FIGS. 55A and 55B. In some embodiments, as depicted in FIG. 59, a masking moiety can be fused to the N-terminus of a heavy chain and/or scFv VH.

[0311] In some embodiments, a constitutive expression construct encodes one or more masked constructs described herein. In some embodiments, an inducible expression construct encodes one or more masked constructs described herein.

[0312] In some embodiments, a constitutive expression construct encodes a masked construct described herein (e.g., a masked construct depicted in FIGS. 56, 57, 58, or 59). In some embodiments, a constitutive expression construct encodes a masked fusion protein or masked Fc-based construct described herein that includes an antigen-binding protein (that targets a TSA or TAA) fused to a target for a CART cell, an ADC, etc., or fused to an anti-idiotype scFv or anti-idiotype peptide that binds an antigen binding receptor of one or more additional cellular therapeutics as described herein. In some embodiments, a constitutive expression construct encodes a masked fusion protein or masked Fc-based construct described herein that includes an antigen-binding protein (that targets a TSA or TAA) fused to a B cell specific marker or portion described herein. In some embodiments, a constitutive expression construct encodes a fusion protein that includes a masked anti-TAA and/or anti-TSA antibody (or portion thereof) and CD19 or fragment. In some embodiments, a constitutive expression construct encodes a masked fusion protein or masked Fc-based construct described herein that includes an antigen-binding protein (that targets a TSA or TAA) fused to an anti-idiotype antibody or portion (e.g., scFv) or anti-idiotype peptide that binds to a B-cell specific marker binding domain of an anti-B-cell specific marker antibody (e.g., a CAR of a CAR-T cell that binds CD19, CD20, CD21, CD22, CD24, CD79a, CD79b, ROR1, or BCMA). In some embodiments, a constitutive expression construct encodes a masked fusion protein or masked Fc-based construct described herein that includes an antigen-binding protein (that targets a TSA or TAA) fused to an anti-idiotype antibody or portion (e.g., scFv) or anti-idiotype peptide that binds to a CD19-binding domain of an anti-CD19 antibody (e.g., an anti-CD19 CAR of a CD19 CAR-T cell). A masked antigen-binding protein (when unmasked) can bind to any known TAA and/or TSA, e.g., any TAA and/or TSA described herein.

[0313] In some embodiments, a masked construct described herein can additionally or alternatively be produced and/or purified using known methods. In some embodiments, such produced and/or purified masked construct can be used, as described herein, as a protein therapeutic.

### Methods of Producing Cellular Therapeutics

[0314] In general, a cellular therapeutic described herein can be produced from an immune cell, e.g., a cell useful in or capable of use in adoptive cell therapy. In some embodiments, a cellular therapeutic is produced from a cell type selected from a group consisting of TILs, T-cells, CD8⁺ cells, CD4⁺ cells, NK-cells, delta-gamma T-cells, regulatory T-cells or peripheral blood mononuclear cells. As used herein “tumor-infiltrating lymphocytes” or TILs refer to white blood cells that have left the bloodstream and migrated into a tumor. Lymphocytes can be divided into three groups including B cells, T cells and natural killer cells. As used herein “T-cells” refers to CD3⁺ cells, including CD4⁺ helper cells, CD8⁺ cytotoxic T-cells and delta-gamma T cells.

[0315] In certain embodiments a cellular therapeutic is produced by genetically modifying (e.g., transforming) a cell, e.g., an immune cell, with a nucleic acid encoding an antigen binding receptor and/or an expression construct described herein (e.g., (i) a first recombinant expression vector that includes a nucleic acid encoding an antigen binding receptor and a second recombinant expression vector that includes an inducible expression construct, (ii) a single recombinant expression vector that includes both a nucleic acid encoding an antigen binding receptor and an inducible expression construct; or (iii) a recombinant expression vector that includes a constitutive expression construct). The recombinant expression vector can comprise any type of nucleotides, including, but not limited to DNA and RNA, which can be single-stranded or double-stranded, synthesized or obtained in part from natural sources, and which can contain natural, non-natural or altered nucleotides. A recombinant expression vector can comprise naturally-occurring or non-naturally-occurring internucleotide linkages, or both types of linkages.

[0316] A recombinant expression vector can be any suitable recombinant expression vector. Suitable vectors include those designed for propagation and expansion or for expression or both, such as plasmids and viruses. For example, a vector can be selected from the pUC series (Fermentas Life Sciences, Glen Burnie, Md.), the pBluescript series (Stratagene, LaJolla, Calif.), the pET series (Novagen, Madison, Wis.), the pGEX series (Pharmacia Biotech, Uppsala, Sweden), and the pEX series (Clontech, Palo Alto, Calif.). Bacteriophage vectors, such as λGT10, λGT11, λZapII (Stratagene), λEMBL4, and λNM1149, also can be used. Examples of plant expression vectors useful in the context of the disclosure include pBI01, pBI101.2, pBI101.3, pBI121 and pBIN19 (Clontech). Examples of animal expression vectors useful in the context of the disclosure include pcDNA, pEUK-Cl, pMAM, and pMAMneo (Clontech). In some embodiments, a bicistronic IRES vector (e.g., from Clontech) is used to include both a nucleic acid encoding an antigen binding receptor and an inducible expression construct described herein.

[0317] In some embodiments, a recombinant expression vector is a viral vector. Suitable viral vectors include, without limitation, retroviral vectors, alphaviral, vaccinial, adenoviral, adeno-associated viral, herpes viral, and fowl pox viral vectors, and preferably have a native or engineered capacity to transform an immune cell (e.g., T cell).

[0318] Recombinant expression vectors can be prepared using standard recombinant DNA techniques described in, for example, Sambrook et al., Molecular Cloning: A Laboratory Manual, 3rd ed., Cold Spring Harbor Press, Cold Spring Harbor, N.Y. 2001; and Ausubel et al., Current Protocols in Molecular Biology, Greene Publishing Associates and John Wiley & Sons, NY, 1994. Constructs of expression vectors, which are circular or linear, can be prepared to contain a replication system functional in a prokaryotic or eukaryotic host cell. Replication systems can be derived, e.g., from ColEl, 2μ plasmid, λ, SV40, bovine papilloma virus, and the like.

[0319] A recombinant expression vector can include one or more marker genes, which allow for selection of transformed or transfected hosts. Marker genes include biocide resistance, e.g., resistance to antibiotics, heavy metals, etc., complementation in an auxotrophic host to provide prototrophy, and the like. Suitable marker genes for the recombinant expression vectors include, for instance, neomycin/G418 resistance genes, puromycin resistance genes, hygromycin resistance genes, histidinol resistance genes, tetracycline resistance genes, and ampicillin resistance genes.

[0320] Vectors useful in the context of the disclosure can be “naked” nucleic acid vectors (i.e., vectors having little or no proteins, sugars, and/or lipids encapsulating them), or vectors complexed with other molecules. Other molecules that can be suitably combined with the vectors include without limitation viral coats, cationic lipids, liposomes, polyamines, gold particles, and targeting moieties such as ligands, receptors, or antibodies that target cellular molecules.

[0321] Vector DNA can be introduced into a cell, e.g., an immune cell, via conventional transformation or transfection techniques. As used herein, the terms “transformation” and “transfection” are intended to refer to a variety of art-recognized techniques for introducing foreign nucleic acid (e.g., DNA) into a cell, including calcium phosphate or calcium chloride co-precipitation, DEAE-dextran-mediated transfection, lipofection, gene gun, or electroporation.

### Protein Therapeutics

[0322] In some aspects, polypeptides encoded by genes that can be included in an expression construct described herein can be produced and used as therapeutics instead of, or in addition to, being produced by a cellular therapeutic described herein. Such polypeptides can be included in a composition, e.g., a pharmaceutical composition, and used as a protein therapeutic. For example, a protein therapeutic that includes a polypeptide that is or comprises a target for a cellular therapeutic, e.g., a CAR-T cell or ADC, can be administered in combination with such cellular therapeutic, e.g., CAR-T cell or ADC.

[0323] In one example, a protein therapeutic includes an antibody fusion protein that contains an antigen binding fragment of an antibody (e.g., one or more of the types described herein) that binds to an antigen (e.g., one or more of the types described herein). In another example, an antibody fusion protein includes a bispecific antibody (or fragment) that binds two antigens. In some embodiments, such a bispecific antibody binds one or more TAA and/or TSA targets, e.g., that together define a specific tumor type. Examples of such combinations of TAA and/or TSA targets that allow for the specific recognition of a tumor type include, e.g., CD70 and carbonic anhydrase IX (renal cell carcinoma), MUC16 and mesothelin (ovarian cancer), and many others. Such antigen binding fragments (e.g., bispecific) are in turn fused to a polypeptide antigen recognized by a cellular therapeutic, e.g. a CAR T cell. One exemplary polypeptide antigen is an Ig domain of CD19 that is recognized by CAR-CD19 T cells. The modular characteristics of antibody antigen recognition domains allow consideration of many combinations of antigen recognition domains fused to target polypeptides for a cellular therapeutic.

[0324] In some embodiments, a polypeptide antigen, e.g., one recognized by a cellular therapeutic, is fused to the amino (N) terminus of an antigen binding fragment. In some embodiments, a polypeptide antigen is fused to the carboxyl (C) terminus of an antigen binding fragment. In some embodiments, an anti-idiotype antibody or fragment described herein is fused to the amino (N) terminus of an antigen binding fragment that binds a tumor antigen. In some embodiments, an anti-idiotype antibody or fragment described herein is fused to the carboxyl (C) terminus of an antigen binding fragment that binds a tumor antigen. In some embodiments, an anti-idiotype peptide described herein is fused to the amino (N) terminus of an antigen binding fragment that binds a tumor antigen. In some embodiments, an anti-idiotype peptide described herein is fused to the carboxyl (C) terminus of an antigen binding fragment that binds a tumor antigen. In particular embodiments, a protein therapeutic is or includes an Fc-based construct described herein.

[0325] A variety of methods of making polypeptides are known in the art and can be used to make a polypeptide to be included in a protein therapeutic. For example, a polypeptide can be recombinantly produced by utilizing a host cell system engineered to express a nucleic acid encoding the polypeptide. Recombinant expression of a gene can include construction of an expression vector containing a polynucleotide that encodes the polypeptide. Once a polynucleotide has been obtained, a vector for the production of the polypeptide can be produced by recombinant DNA technology using techniques known in the art. Known methods can be used to construct expression vectors containing polypeptide coding sequences and appropriate transcriptional and translational control signals. These methods include, for example, in vitro recombinant DNA techniques, synthetic techniques, and in vivo genetic recombination.

[0326] An expression vector can be transferred to a host cell by conventional techniques, and transfected cells can then be cultured by conventional techniques to produce polypeptide.

[0327] A variety of host expression vector systems can be used (see, e.g., U.S. Pat. No. 5,807,715). Such host-expression systems can be used to produce polypeptides and, where desired, subsequently purified. Such host expression systems include microorganisms such as bacteria (e.g., E. coli and B. subtilis) transformed with recombinant bacteriophage DNA, plasmid DNA or cosmid DNA expression vectors containing polypeptide coding sequences; yeast (e.g., Saccharomyces and Pichia) transformed with recombinant yeast expression vectors containing polypeptide coding sequences; insect cell systems infected with recombinant virus expression vectors (e.g., baculovirus) containing polypeptide coding sequences; plant cell systems infected with recombinant virus expression vectors (e.g., cauliflower mosaic virus, CaMV; tobacco mosaic virus, TMV) or transformed with recombinant plasmid expression vectors (e.g., Ti plasmid) containing polypeptide coding sequences; or mammalian cell systems (e.g., COS, CHO, BHK, 293, NSO, and 3T3 cells) harboring recombinant expression constructs containing promoters derived from the genome of mammalian cells (e.g., metallothionein promoter) or from mammalian viruses (e.g., the adenovirus late promoter; the vaccinia virus 7.5K promoter).

[0328] For bacterial systems, a number of expression vectors can be used, including, but not limited to, the E. coli expression vector pUR278 (Ruther et al., 1983, EMBO 12:1791); pIN vectors (Inouye & Inouye, 1985, Nucleic Acids Res. 13:3101-3109; Van Heeke & Schuster, 1989, J. Biol. Chem. 24:5503-5509); and the like. pGEX vectors can also be used to express foreign polypeptides as fusion proteins with glutathione 5-transferase (GST).

[0329] For expression in mammalian host cells, viral-based expression systems can be utilized (see, e.g., Logan & Shenk, 1984, Proc. Natl. Acad. Sci. USA 8 1:355-359). The efficiency of expression can be enhanced by inclusion of appropriate transcription enhancer elements, transcription terminators, etc. (see, e.g., Bittner et al., 1987, Methods in Enzymol. 153 :516-544).

[0330] In addition, a host cell strain can be chosen that modulates expression of inserted sequences, or modifies and processes the gene product in the specific fashion desired. Different host cells have characteristic and specific mechanisms for post-translational processing and modification of proteins and gene products. Appropriate cell lines or host systems can be chosen to ensure the correct modification and processing of the polypeptide expressed. Such cells include, for example, established mammalian cell lines and insect cell lines, animal cells, fungal cells, and yeast cells. Mammalian host cells include, e.g., BALB/c mouse myeloma line (NSO/1, ECACC No: 85110503); human retinoblasts (PER.C6, CruCell, Leiden, The Netherlands); monkey kidney CV1 line transformed by SV40 (COS-7, ATCC CRL 1651); human embryonic kidney line (293 or 293 cells subcloned for growth in suspension culture, Graham et al., J. Gen Virol., 36:59,1977); human fibrosarcoma cell line (e.g., HT1080); baby hamster kidney cells (BHK, ATCC CCL 10); Chinese hamster ovary cells +/−DHFR (CHO, Urlaub and Chasin, Proc. Natl. Acad. Sci. USA, 77:4216, 1980); mouse sertoli cells (TM4, Mather, Biol. Reprod., 23:243-251, 1980); monkey kidney cells (CV1 ATCC CCL 70); African green monkey kidney cells (VERO-76, ATCC CRL-1 587); human cervical carcinoma cells (HeLa, ATCC CCL 2); canine kidney cells (MDCK, ATCC CCL 34); buffalo rat liver cells (BRL 3A, ATCC CRL 1442); human lung cells (W138, ATCC CCL 75); human liver cells (Hep G2, HB 8065); mouse mammary tumor (MMT 060562, ATCC CCL51); TM cells (Mather et al., Annals N.Y. Acad. Sci., 383:44-68, 1982); MRC 5 cells; FS4 cells; and a human hepatoma line (Hep G2).

[0331] For long-term, high-yield production of recombinant proteins, host cells are engineered to stably express a polypeptide. Host cells can be transformed with DNA controlled by appropriate expression control elements known in the art, including promoter, enhancer, sequences, transcription terminators, polyadenylation sites, and selectable markers. Methods commonly known in the art of recombinant DNA technology can be used to select a desired recombinant clone.

[0332] Once a protein described herein has been produced by recombinant expression, it may be purified by any method known in the art for purification, for example, by chromatography (e.g., ion exchange, affinity, and sizing column chromatography), centrifugation, differential solubility, or by any other standard technique for purification of proteins. For example, an antibody can be isolated and purified by appropriately selecting and combining affinity columns such as Protein A column with chromatography columns, filtration, ultra filtration, salting-out and dialysis procedures (see Antibodies: A Laboratory Manual, Ed Harlow, David Lane, Cold Spring Harbor Laboratory, 1988). Further, as described herein, a polypeptide can be fused to heterologous polypeptide sequences to facilitate purification. Alternatively or additionally, a polypeptide can be partially or fully prepared by chemical synthesis. Alternatively or additionally, a polypeptide can be purified from natural sources.

### Administration

[0333] Certain embodiments of the disclosure include methods of administering to a subject a cellular therapeutic described herein (or a population thereof), a protein therapeutic described herein, a composition comprising a cellular therapeutic, and/or a composition comprising a protein therapeutic, e.g., in an amount effective to treat a subject. In some embodiments, the method effectively treats cancer in the subject.

[0334] In some embodiments, an immune cell is obtained from a subject and is transformed, e.g., transduced, with inducible expression construct or a constitutive expression construct described herein, e.g., an expression vector comprising an inducible expression construct or a constitutive expression construct described herein, to obtain a cellular therapeutic. Thus, in some embodiments, a cellular therapeutic comprises an autologous cell that is administered into the same subject from which an immune cell was obtained. Alternatively, an immune cell is obtained from a subject and is transformed, e.g., transduced, with an inducible expression construct or a constitutive expression construct described herein, e.g., an expression vector comprising an inducible expression construct or a constitutive expression construct described herein, to obtain a cellular therapeutic that is allogenically transferred into another subject.

[0335] In some embodiments, a cellular therapeutic is autologous to a subject, and the subject can be immunologically naive, immunized, diseased, or in another condition prior to isolation of an immune cell from the subject.

[0336] In some embodiments, additional steps can be performed prior to administration to a subject. For instance, a cellular therapeutic can be expanded in vitro after contacting (e.g., transducing or transfecting) an immune cell with an inducible expression construct or a constitutive expression construct described herein (e.g., an expression vector comprising an inducible expression construct or a constitutive expression construct), but prior to the administration to a subject. In vitro expansion can proceed for 1 day or more, e.g., 2 days or more, 3 days or more, 4 days or more, 6 days or more, or 8 days or more, prior to the administration to a subject. Alternatively, or in addition, in vitro expansion can proceed for 21 days or less, e.g., 18 days or less, 16 days or less, 14 days or less, 10 days or less, 7 days or less, or 5 days or less, prior to administration to a subject. For example, in vitro expansion can proceed for 1-7 days, 2-10 days, 3-5 days, or 8-14 days prior to the administration to a subject.

[0337] In some embodiments, during in vitro expansion, a cellular therapeutic can be stimulated with an antigen (e.g., a TCR antigen). Antigen specific expansion optionally can be supplemented with expansion under conditions that non-specifically stimulate lymphocyte proliferation such as, for example, anti-CD3 antibody, anti-Tac antibody, anti-CD28 antibody, or phytohemagglutinin (PHA). The expanded cellular therapeutic can be directly administered into a subject or can be frozen for future use, i.e., for subsequent administrations to a subject.

[0338] In some embodiments, a cellular therapeutic is treated ex vivo with interleukin-2 (IL-2) prior to infusion into a cancer patient, and the cancer patient is treated with IL-2 after infusion. Furthermore, in some embodiments, a cancer patient can undergo preparative lymphodepletion—the temporary ablation of the immune system—prior to administration of a cellular therapeutic. A combination of IL-2 treatment and preparative lymphodepletion can enhance persistence of a cellular therapeutic.

[0339] In some embodiments, a cellular therapeutic is transduced or transfected with a nucleic acid encoding a cytokine, which nucleic acid can be engineered to provide for constitutive, regulatable, or temporally-controlled expression of the cytokine. Suitable cytokines include, for example, cytokines which act to enhance the survival of T lymphocytes during the contraction phase, which can facilitate the formation and survival of memory T lymphocytes.

[0340] In certain embodiments, a cellular therapeutic is administered prior to, substantially simultaneously with, or after the administration of another therapeutic agent, such as a cancer therapeutic agent. The cancer therapeutic agent can be, e.g., a chemotherapeutic agent, a biological agent, or radiation treatment. In some embodiments, a subject receiving a cellular therapeutic is not administered a treatment which is sufficient to cause a depletion of immune cells, such as lymphodepleting chemotherapy or radiation therapy.

[0341] A cellular therapeutic described herein can be formed as a composition, e.g., a cellular therapeutic and a pharmaceutically acceptable carrier. In certain embodiments, a composition is a pharmaceutical composition comprising at least one cellular therapeutic described herein and a pharmaceutically acceptable carrier, diluent, and/or excipient. Pharmaceutically acceptable carriers described herein, for example, vehicles, adjuvants, excipients, and diluents, are well-known and readily available to those skilled in the art. Preferably, the pharmaceutically acceptable carrier is chemically inert to the active agent(s), e.g., a cellular therapeutic, and does not elicit any detrimental side effects or toxicity under the conditions of use.

[0342] A composition can be formulated for administration by any suitable route, such as, for example, intravenous, intratumoral, intraarterial, intramuscular, intraperitoneal, intrathecal, epidural, and/or subcutaneous administration routes. Preferably, the composition is formulated for a parenteral route of administration.

[0343] A composition suitable for parenteral administration can be an aqueous or nonaqueous, isotonic sterile injection solution, which can contain anti-oxidants, buffers, bacteriostats, and solutes, for example, that render the composition isotonic with the blood of the intended recipient. An aqueous or nonaqueous sterile suspension can contain one or more suspending agents, solubilizers, thickening agents, stabilizers, and preservatives.

[0344] Dosage administered to a subject, particularly a human, will vary with the particular embodiment, the composition employed, the method of administration, and the particular site and subject being treated. However, a dose should be sufficient to provide a therapeutic response. A clinician skilled in the art can determine the therapeutically effective amount of a composition to be administered to a human or other subject in order to treat or prevent a particular medical condition. The precise amount of the composition required to be therapeutically effective will depend upon numerous factors, e.g., such as the specific activity of the cellular therapeutic, and the route of administration, in addition to many subject-specific considerations, which are within those of skill in the art.

[0345] Any suitable number cellular therapeutic cells can be administered to a subject. While a single cellular therapeutic cell described herein is capable of expanding and providing a therapeutic benefit, in some embodiments, 10² or more, e.g., 10³ or more, 10⁴ or more, 10⁵ or more, or 10⁸ or more, cellular therapeutic cells are administered. Alternatively, or additionally 10¹² or less, e.g., 10¹¹ or less, 10⁹ or less, 10⁷ or less, or 10⁵ or less, cellular therapeutic cells described herein are administered to a subject. In some embodiments, 10²-10⁵, 10⁴-10⁷, 10³-10⁹, or 10⁵-10¹⁰ cellular therapeutic cells described herein are administered.

[0346] A dose of a cellular therapeutic described herein can be administered to a mammal at one time or in a series of subdoses administered over a suitable period of time, e.g., on a daily, semi-weekly, weekly, bi-weekly, semi-monthly, bi-monthly, semi-annual, or annual basis, as needed. A dosage unit comprising an effective amount of a cellular therapeutic may be administered in a single daily dose, or the total daily dosage may be administered in two, three, four, or more divided doses administered daily, as needed.

[0347] A polypeptide described herein can be incorporated into a pharmaceutical composition (e.g., for use as a protein therapeutic). Pharmaceutical compositions comprising a polypeptide can be formulated by methods known to those skilled in the art (see, e.g., Remington's Pharmaceutical Sciences pp. 1447-1676 (Alfonso R. Gennaro, ed., 19th ed. 1995)). Pharmaceutical composition can be administered parenterally in the form of an injectable formulation comprising a sterile solution or suspension in water or another pharmaceutically acceptable liquid. For example, a pharmaceutical composition can be formulated by suitably combining a polypeptide with pharmaceutically acceptable vehicles or media, such as sterile water and physiological saline, vegetable oil, emulsifier, suspension agent, surfactant, stabilizer, flavoring excipient, diluent, vehicle, preservative, binder, followed by mixing in a unit dose form required for generally accepted pharmaceutical practices. The amount of active ingredient included in pharmaceutical preparations is such that a suitable dose within the designated range is provided.

[0348] The sterile composition for injection can be formulated in accordance with conventional pharmaceutical practices using distilled water for injection as a vehicle. For example, physiological saline or an isotonic solution containing glucose and other supplements such as D-sorbitol, D-mannose, D-mannitol, and sodium chloride may be used as an aqueous solution for injection, optionally in combination with a suitable solubilizing agent, for example, alcohol such as ethanol and polyalcohol such as propylene glycol or polyethylene glycol, and a nonionic surfactant such as polysorbate 80™, HCO-50 and the like.

[0349] Nonlimiting examples of oily liquid include sesame oil and soybean oil, and it may be combined with benzyl benzoate or benzyl alcohol as a solubilizing agent. Other items that may be included are a buffer such as a phosphate buffer, or sodium acetate buffer, a soothing agent such as procaine hydrochloride, a stabilizer such as benzyl alcohol or phenol, and an antioxidant. The formulated injection can be packaged in a suitable ampule.

[0350] Route of administration can be parenteral, for example, administration by injection, transnasal administration, transpulmonary administration, or transcutaneous administration. Administration can be systemic or local by intravenous injection, intramuscular injection, intraperitoneal injection, subcutaneous injection.

[0351] A suitable means of administration can be selected based on the age and condition of the subject. A single dose of a pharmaceutical composition containing a polypeptide can be selected from a range of 0.001 to 1000 mg/kg of body weight. On the other hand, a dose can be selected in the range of 0.001 to 100000 mg/body weight, but the present disclosure is not limited to such ranges. Dose and method of administration can vary depending on the weight, age, condition, and the like of the subject, and can be suitably selected as needed by those skilled in the art.

### Tumors

[0352] The present disclosure provides technologies useful in the treatment of any tumor. In some embodiments, a tumor is or comprises a hematologic malignancy, including but not limited to, acute lymphoblastic leukemia, acute myeloid leukemia, chronic lymphocytic leukemia, chronic myelogenous leukemia, hairy cell leukemia, AIDS-related lymphoma, Hodgkin lymphoma, non-Hodgkin lymphoma, Langerhans cell histiocytosis, multiple myeloma, or myeloproliferative neoplasms.

[0353] In some embodiments, a tumor is or comprises a solid tumor, including but not limited to breast carcinoma, a squamous cell carcinoma, a colon cancer, a head and neck cancer, ovarian cancer, a lung cancer, mesothelioma, a genitourinary cancer, a rectal cancer, a gastric cancer, or an esophageal cancer.

[0354] In some particular embodiments, a tumor is or comprises an advanced tumor, and/or a refractory tumor. In some embodiments, a tumor is characterized as advanced when certain pathologies are observed in a tumor (e.g., in a tissue sample, such as a biopsy sample, obtained from a tumor) and/or when cancer patients with such tumors are typically considered not to be candidates for conventional chemotherapy. In some embodiments, pathologies characterizing tumors as advanced can include tumor size, altered expression of genetic markers, invasion of adjacent organs and/ or lymph nodes by tumor cells. In some embodiments, a tumor is characterized as refractory when patients having such a tumor are resistant to one or more known therapeutic modalities (e.g., one or more conventional chemotherapy regimens) and/or when a particular patient has demonstrated resistance (e.g., lack of responsiveness) to one or more such known therapeutic modalities.

### Melanoma

[0355] Melanoma is the fifth most common type of new cancer diagnosis in American men and the seventh most common type in American women. The incidence and mortality rates for invasive melanoma are highest in whites, who have a much higher risk of developing melanoma than African Americans. Among people younger than 45 years, incidence rates are higher in women than in men. By age 60 years, melanoma incidence rates in men are more than twice those of women; by age 80 years, men are nearly three times more likely to develop melanoma than women. The annual incidence rate of melanoma among whites increased by more than 60 percent from 1991 to 2011. The incidence of melanoma has been increasing more rapidly among whites aged 65 and older than among any other group.

[0356] Risk factors for melanoma include having fair skin that burns easily, high lifetime exposure to natural or artificial sunlight, a history of blistering sunburns (particularly at a young age), many common moles, a personal or family history of dysplastic nevi or melanoma, and being white. Standard treatments for melanoma include surgery, chemotherapy, radiation therapy, targeted therapy, and biological therapy.

### Lung Cancer

[0357] Lung cancer is the second most common cancer and the primary cause of cancer-related death in both men and women in the United States. The overall mortality rate for lung and bronchus cancers rose steadily through the 1980s, peaked in the early 1990s, and has been slowly declining since 2001. Trends in lung cancer incidence and mortality rates have closely mirrored historical patterns of smoking prevalence, after accounting for a lag period. Because the prevalence of smoking peaked later in women than in men, lung cancer incidence and mortality rates began declining later for women than men. The incidence rate has been declining since the mid-1980s in men but only since the mid-2000s in women; the mortality rate began declining in 1991 in men and but not until 2003 in women. Incidence and mortality rates are highest among African American men, followed by white men.

[0358] Although smoking is the main cause of lung cancer, lung cancer risk also is increased by exposure to secondhand smoke; environmental exposures, such as radon, workplace toxins (e.g., asbestos, arsenic), and air pollution. Standard treatments for lung cancer include surgery, radiation therapy, chemotherapy, targeted therapy, laser therapy, photodynamic therapy, cryosurgery, endoscopic stent placement, and electrocautery.

### Head and Neck Cancer

[0359] Head and neck cancers, which include cancers of the oral cavity, larynx, pharynx, salivary glands, and nose/nasal passages, account for approximately three percent of all malignancies in the United States. Alcohol and tobacco are the two most prominent risk factors for head and neck cancers with at least 75 percent of head and neck cancers caused by alcohol and tobacco use. Other risk factors can include infection with human papillomavirus especially HPV-16; consumption of Pann (betel quid), Mate and certain preserved or salted foods; poor oral health, occupational or radiation exposure; Epstein-Barr virus infection; and ancestry.

### Colorectal Cancer

[0360] Colorectal cancer is the third most common non-skin cancer in both men and women. It is the second leading cause of cancer-related mortality in the United States. Over the past decade, colorectal cancer incidence and mortality rates have decreased in all racial/ethnic populations except American Indians/Alaska Natives. Men and women have similar incidence rates through age 39; at and above age 40, rates are higher in men.

[0361] Differences exist between racial/ethnic groups in both incidence and mortality. African Americans have higher mortality rates than all other racial/ethnic groups and higher incidence rates than all except American Indians/Alaska Natives. Incidence and mortality rates are lowest among Hispanics and Asians/Pacific Islanders. Overall colorectal cancer incidence and mortality rates have been declining over the past two decades; these declines have been attributed largely to increased use of screening tests.

[0362] Risk factors for colorectal cancer include increasing age, colorectal polyps, a family history of colorectal cancer, certain genetic mutations, excessive alcohol use, obesity, being physically inactive, cigarette smoking, and a history of inflammatory bowel disease. Standard treatments for colorectal cancer include surgery, chemotherapy, radiation therapy, cryosurgery, radiofrequency ablation, and targeted therapy.

### Lymphoma

[0363] Lymphoma, including Hodgkin lymphoma and non-Hodgkin lymphoma (NHL), is the most common blood cancer in the United States and is estimated to represent approximately 5 percent of all new cancers diagnosed in the United States in 2014. Nearly 71,000 new cases of NHL and nearly 9,200 new cases of Hodgkin lymphoma are estimated for 2014. Incidence rates for Hodgkin lymphoma are highest for whites and African Americans; mortality rates are highest for whites, Hispanics, and African Americans.

[0364] Risk factors for both Hodgkin lymphoma and NHL include being male, having a weakened immune system, or being infected with human immunodeficiency virus (HIV) or Epstein-Barr virus. Infection with Helicobacter pylori or human T-cell leukemia/lymphoma virus type 1 (HTLV-1) increases the risk for certain types of NHL. The risk of NHL increases with age, whereas the risk of Hodgkin lymphoma is higher in both early adulthood and later life. Standard treatments for both types of lymphoma are chemotherapy, radiation therapy, and stem cell transplant. Additional standard therapies include surgery for Hodgkin lymphoma and targeted therapy, plasmapheresis, watchful waiting and biological therapy for NHL.

### B Cell Tumors

[0365] In some embodiments, a B cell specific marker antibody (or portion thereof)/CD19 fusion protein, or a CD19/B-cell specific marker antibody (or portion) fusion protein described herein is used to treat a subject having a B cell tumor. In some embodiments, an scFv/CD19 fusion protein, e.g., an anti-CD20 scFv/CD19 fusion protein or an anti-CD20 scFv/CD19 fragment fusion protein is used to treat a subject having a B cell tumor. In some embodiments, a CD19/scFv fusion protein, e.g., a CD19/anti-CD20 scFv fusion protein, or a CD19 fragment/anti-CD20 scFv fusion protein, is used to treat a subject having a B cell tumor. In some embodiments, an scFv/scFv fusion protein, e.g., a fusion protein that includes (i) an anti-CD20 scFv and (ii) an anti-idiotype antibody or portion that recognizes an anti-CD19 antibody (e.g., anti-CD19 scFv), is used to treat a subject having a B cell tumor. In some embodiments, an scFv/anti-idiotype peptide fusion protein, e.g., a fusion protein that includes (i) an anti-CD20 scFv and (ii) an anti-idiotype peptide that recognizes an anti-CD19 antibody (e.g., anti-CD19 scFv), is used to treat a subject having a B cell tumor. In some embodiments, a B cell specific marker antibody (or portion thereof)/B cell specific marker (or portion) fusion protein, or a B cell specific marker (or portion)/B-cell specific marker antibody (or portion) fusion protein is used to treat a subject having a B cell tumor. In some embodiments, a fusion protein that includes (i) CD22 or portion (e.g., one or more of domains 1-3), CD79 or portion (e.g., CD79a or CD79b), and (ii) a B cell specific marker antibody or portion (e.g., an anti-CD19, CD20, CD21, CD22, CD72, or CD180 scFv) is used to treat a subject having a B cell tumor.

[0366] In some embodiments, a fusion protein that includes a B cell specific marker antibody (or portion thereof) and CD20 (or portion) is used to treat a subject having a B cell tumor. In some embodiments, a fusion protein that includes a B cell specific marker antibody (or portion thereof) and a portion of CD20 that is or includes an epitope of CD20 (as described in, e.g., Natarajan et al., Clin. Cancer Res. 19:6820-9 (2013)) is used to treat a subject having a B cell tumor.

[0367] In some embodiments, a fusion protein that includes (i) an antibody or fragment (e.g., scFv) that binds to a B cell specific marker, and (ii) an anti-idiotype antibody (e.g., anti-idiotype scFv) that binds to a B-cell specific marker binding domain of an anti-B-cell specific marker antibody (e.g., a CAR of a CAR-T cell that binds CD19, CD20, CD21, CD22, CD24, CD79a, CD79b, ROR1, or BCMA) described herein is used to treat a subject having a B cell tumor. In some embodiments, a fusion protein that includes (i) an antibody or fragment (e.g., scFv) that binds to a B cell specific marker, and (ii) an anti-idiotype peptide that binds to a B-cell specific marker binding domain of an anti-B-cell specific marker antibody (e.g., a CAR of a CAR-T cell that binds CD19, CD20, CD21, CD22, CD24, CD79a, CD79b, ROR1, or BCMA) described herein is used to treat a subject having a B cell tumor.

[0368] In some embodiments, a subject having a B cell tumor is treated with one or more of these fusion proteins as a protein therapeutic. In some embodiments, a subject having a B cell tumor is treated with a cellular therapeutic that includes a constitutive expression construct described herein that encodes one or more of these fusion proteins. In some embodiments, a subject having a B cell tumor is treated with a naked nucleic acid encoding one or more of these fusion proteins, or is treated with a viral vector described herein that includes a nucleic acid encoding such fusion protein.

### Hematological Malignancies

[0369] In some embodiments, a fusion protein described herein that includes (i) an antigen-binding protein that binds to a TSA and (ii) CD19 or portion thereof is used to treat a subject having a hematological malignancy. In some embodiments, a fusion protein described herein that includes (i) an antigen-binding protein that binds to a TSA and (ii) an anti-idiotype antibody or portion that recognizes an anti-CD19 antibody (e.g., anti-CD19 scFv) is used to treat a subject having a hematological malignancy. In some embodiments, a fusion protein described herein that includes (i) an antigen-binding protein that binds to a TSA and (ii) an anti-idiotype peptide that recognizes an anti-CD19 antibody (e.g., anti-CD19 scFv) is used to treat a subject having a hematological malignancy. In some embodiments, a TSA binding protein (e.g., an anti-TSA antibody (or portion thereof)/CD19 fusion protein, or a CD19/TSA binding protein (e.g., anti-TSA antibody) fusion protein is used to treat a subject having a hematological malignancy. In some embodiments, a hematological malignancy is a malignancy of hematological cells not defined by CD19 expression. In some embodiments, a hematological malignancy may be a non-B cell lineage malignancy. In some embodiments, a hematological malignancy may include, for example, a myeloid malignancy (e.g., acute myeloid malignancy), plasma cell malignancy, and myelodysplatic malignancy. In some embodiments, A TSA-binding protein (e.g., an anti-TSA antibody) can bind to any known TSA, e.g., any TSA described herein. In some embodiments, a TSA is ROR1, BCMA, CS1, CD33, CD123, CD38, CD138, or CLL-1/CLECK12A.

[0370] In some embodiments, a fusion protein described herein that includes (i) an antigen-binding protein that binds to a TSA and (ii) a B cell specific marker or portion thereof is used to treat a subject having a hematological malignancy. In some embodiments, a TSA binding protein (e.g., an anti-TSA antibody (or portion thereof))/B cell specific marker fusion protein, or a B cell specific marker/ TSA binding protein (e.g., anti-TSA antibody) fusion protein is used to treat a hematological malignancy. In some embodiments, a fusion protein includes a B cell specific marker or portion (e.g., CD20 or portion (e.g., an epitope as described in, e.g., Natarajan et al., Clin. Cancer Res. 19:6820-9 (2013), CD22 or portion (e.g., one or more of domains 1-3), or CD79 or portion (e.g., CD79a or CD79b)). In some embodiments, a fusion protein that includes (i) an antibody or fragment (e.g., scFv) that binds to a TSA, and (ii) an anti-idiotype antibody (e.g., anti-idiotype scFv) that binds to a B-cell specific marker binding domain of an anti-B-cell specific marker antibody (e.g., a CAR of a CAR-T cell that binds CD19, CD20, CD21, CD22, CD24, CD79a, CD79b, ROR1, or BCMA) described herein is used to treat a subject having a hematological malignancy. In some embodiments, a fusion protein that includes (i) an antibody or fragment (e.g., scFv) that binds to a TSA, and (ii) an anti-idiotype peptide that binds to a B-cell specific marker binding domain of an anti-B-cell specific marker antibody (e.g., a CAR of a CAR-T cell that binds CD19, CD20, CD21, CD22, CD24, CD79a, CD79b, ROR1, or BCMA) described herein is used to treat a subject having a hematological malignancy.

[0371] In some embodiments, a subject having a hematological malignancy is treated with one or more of these fusion proteins as a protein therapeutic. In some embodiments, a subject having a hematological malignancy is treated with a cellular therapeutic that includes a constitutive expression construct described herein that encodes one or more of these fusion proteins. In some embodiments, a subject having a hematological malignancy is treated with a naked nucleic acid encoding one or more of these fusion proteins, or is treated with a viral vector described herein that includes a nucleic acid encoding such fusion protein.

### Solid Tumors

[0372] In some embodiments, a cellular therapeutic described herein that includes a constitutive expression construct can be used to treat a subject having a solid tumor. In some embodiments, the constitutive expression construct encodes a fusion protein described herein that includes (i) an antigen binding protein that targets a TSA, and (ii) a target for a second cellular therapeutic, antibody, or antibody-drug conjugate. In some embodiments, a constitutive expression construct encodes a fusion protein described herein that includes (i) an antibody or fragment (e.g., scFv) that binds to a TSA, and (ii) an anti-idiotype antibody (e.g., anti-idiotype scFv) that binds to a B-cell specific marker binding domain of an anti-B-cell specific marker antibody (e.g., a CAR of a CAR-T cell that binds CD19, CD20, CD21, CD22, CD24, CD79a, CD79b, ROR1, or BCMA). In some embodiments, a constitutive expression construct encodes a fusion protein described herein that includes (i) an antibody or fragment (e.g., scFv) that binds to a TSA, and (ii) an anti-idiotype peptide that binds to a B-cell specific marker binding domain of an anti-B-cell specific marker antibody (e.g., a CAR of a CAR-T cell that binds CD19, CD20, CD21, CD22, CD24, CD79a, CD79b, ROR1, or BCMA). In some embodiments, a cellular therapeutic described herein that includes an inducible expression construct can be used to treat a subject having a solid tumor. In some embodiments, the inducible expression construct encodes a fusion protein described herein that includes (i) an antigen binding protein that targets a TSA or TAA, and (ii) a target for a second cellular therapeutic, antibody, or antibody-drug conjugate. In some embodiments, the inducible expression construct encodes a fusion protein described herein that includes (i) an antigen binding protein that targets a TSA or TAA, and (ii) an anti-idiotype antibody or portion that binds an anti-CD19 antibody (e.g., anti-CD19 scFv). In some embodiments, the inducible expression construct encodes a fusion protein described herein that includes (i) an antigen binding protein that targets a TSA or TAA, and (ii) an anti-idiotype peptide that binds an anti-CD19 antibody (e.g., anti-CD19 scFv). In some embodiments, a fusion protein that is or includes a masked construct or portion thereof (described herein) is used to treat a subject having a solid tumor. In some embodiments, a fusion protein that includes a masked antigen-binding protein (that, when unmasked, binds a TAA described herein) and CD19 or fragment is used to treat a subject having a solid tumor.

[0373] In some embodiments, a subject having a solid tumor is treated with one or more of these fusion proteins as a protein therapeutic. In some embodiments, a subject having a solid tumor is treated with a cellular therapeutic that includes a constitutive expression construct described herein that encodes one or more of these fusion proteins. In some embodiments, a subject having a solid tumor is treated with a naked nucleic acid encoding one or more of these fusion proteins, or is treated with a viral vector described herein that includes a nucleic acid encoding such fusion protein.

### Combination Therapy

[0374] As described herein, in some embodiments, a cellular therapeutic and/or a protein therapeutic is administered in combination with a second cellular therapeutic, an antibody-drug conjugate, an antibody, and/or a polypeptide. In some embodiments, the extent of tumor targeting and/or killing by a second cellular therapeutic (e.g., CAR-T cell) is higher than a level observed or measured in the absence of combined therapy with a cellular therapeutic or a protein therapeutic described herein.

[0375] A pharmaceutical composition comprising a cellular therapeutic and/or a protein therapeutic described herein can optionally contain, and/or be administered in combination with, one or more additional therapeutic agents, such as a cancer therapeutic agent, e.g., a chemotherapeutic agent or a biological agent. Examples of chemotherapeutic agents that can be used in combination with a cellular therapeutic described herein include platinum compounds (e.g., cisplatin, carboplatin, and oxaliplatin), alkylating agents (e.g., cyclophosphamide, ifosfamide, chlorambucil, nitrogen mustard, thiotepa, melphalan, busulfan, procarbazine, streptozocin, temozolomide, dacarbazine, and bendamustine), antitumor antibiotics (e.g., daunorubicin, doxorubicin, idarubicin, epirubicin, mitoxantrone, bleomycin, mytomycin C, plicamycin, and dactinomycin), taxanes (e.g., paclitaxel and docetaxel), antimetabolites (e.g., 5-fluorouracil, cytarabine, premetrexed, thioguanine, floxuridine, capecitabine, and methotrexate), nucleoside analogues (e.g., fludarabine, clofarabine, cladribine, pentostatin, and nelarabine), topoisomerase inhibitors (e.g., topotecan and irinotecan), hypomethylating agents (e.g., azacitidine and decitabine), proteosome inhibitors (e.g., bortezomib), epipodophyllotoxins (e.g., etoposide and teniposide), DNA synthesis inhibitors (e.g., hydroxyurea), vinca alkaloids (e.g., vicristine, vindesine, vinorelbine, and vinblastine), tyrosine kinase inhibitors (e.g., imatinib, dasatinib, nilotinib, sorafenib, and sunitinib), nitrosoureas (e.g., carmustine, fotemustine, and lomustine), hexamethylmelamine, mitotane, angiogenesis inhibitors (e.g., thalidomide and lenalidomide), steroids (e.g., prednisone, dexamethasone, and prednisolone), hormonal agents (e.g., tamoxifen, raloxifene, leuprolide, bicaluatmide, granisetron, and flutamide), aromatase inhibitors (e.g., letrozole and anastrozole), arsenic trioxide, tretinoin, nonselective cyclooxygenase inhibitors (e.g., nonsteroidal anti-inflammatory agents, salicylates, aspirin, piroxicam, ibuprofen, indomethacin, naprosyn, diclofenac, tolmetin, ketoprofen, nabumetone, and oxaprozin), selective cyclooxygenase-2 (COX-2) inhibitors, or any combination thereof.

[0376] Examples of biological agents that can be used in the compositions and methods described herein include monoclonal antibodies (e.g., rituximab, cetuximab, panetumumab, tositumomab, trastuzumab, alemtuzumab, gemtuzumab ozogamicin, bevacizumab, catumaxomab, denosumab, obinutuzumab, ofatumumab, ramucirumab, pertuzumab, ipilimumab, nivolumab, nimotuzumab, lambrolizumab, pidilizumab, siltuximab, BMS-936559, RG7446/MPDL3280A, MEDI4736, tremelimumab, or others listed in Table 1 herein), enzymes (e.g., L-asparaginase), cytokines (e.g., interferons and interleukins), growth factors (e.g., colony stimulating factors and erythropoietin), cancer vaccines, gene therapy vectors, or any combination thereof.

[0377] In some embodiments, treatment methods described herein are performed on subjects for which other treatments of the medical condition have failed or have had less success in treatment through other means. Additionally, the treatment methods described herein can be performed in conjunction with one or more additional treatments of the medical condition. For instance, the method can comprise administering a cancer regimen, e.g., nonmyeloablative chemotherapy, surgery, hormone therapy, and/or radiation, prior to, substantially simultaneously with, or after the administration of a cellular therapeutic and/or a protein therapeutic described herein, or composition thereof. In certain embodiments, a subject to which a cellular therapeutic and/or a protein therapeutic described herein is administered can also be treated with antibiotics and/or one or more additional pharmaceutical agents.

[0378] Exemplary amino acid and nucleotide sequences of the disclosure are listed in the following Table:

| Amino acid | Nucleotide | |
|---|---|---|
| SEQ ID NO: | SEQ ID NO: | Name |
| 1 | 201 | Panitumumab Heavy Chain (HC) |
| 2 | 202 | CD19-D1-Panitumumab Light Chain (LC) |
| 3 | 203 | CD19-D1-Panitumumab HC |
| 4 | 204 | Panitumumab LC |
| 5 | 205 | Panitumumab LC-CD19-D1 |
| 6 | 206 | Panitumumab HC-CD19-D1 |
| 7 | 207 | LY2875358 HC |
| 8 | 208 | CD19-D1-LY2875358 LC |
| 9 | 209 | CD19-D1-LY2875358 HC |
| 10 | 210 | LY2875358 LC |
| 11 | 211 | LY2875358 LC-CD19-D1 |
| 12 | 212 | LY2875358 HC-CD19-D1 |
| 13 | 213 | FMC63 CAR-19 construct |
| 14 | 214 | CD19-D1 |
| 15 | 215 | CD19-D1-huIgGFc |
| 16 | 216 | Trastuzumab scFv (VH/VL) |
| 17 | 217 | MOC31 scFv (VH/VL) |
| 18 | 218 | MOC31 scFv (VL/VH) |
| 19 | 219 | LY2875358 scFv (VH/VL) |
| 20 | 220 | LY2875358 scFv (VL/VH) |
| 21 | 221 | Panitumumab scFv (VH/VL) |
| 22 | 222 | Panitumumab scFv (VL/VH) |
| 23 | 223 | CD19-D1 + 2-soluble TNF |
| 24 | 224 | Trastuzumab scFv (VH/VL)-CD19-D1 |
| 25 | 225 | Trastuzumab scFv (VH/VL)-CD19-D1- |
| | | huIgGFc |
| 26 | 226 | CD19-D1-Trastuzumab scFv (VH/VL) |
| 27 | 227 | CD19-D1-Trastuzumab scFv (VH/VL)- |
| | | huIgGFc |
| 28 | 228 | CD19-D1 + 2 |
| 29 | 229 | CD19-D1 + D2-huIgGFc |
| 30 | 230 | CD19-D2 |
| 31 | 231 | CD19-D2-huIgGFc |
| 32 | 232 | CD19-D1 + 2-Panitumumab LC |
| 33 | 233 | CD19-D1 + 2-Panitumumab HC |
| 34 | 234 | Panitumumab LC-CD19-D1 + 2 |
| 35 | 235 | Panitumumab HC-CD19-D1 + 2 |
| 36 | 236 | CD19-D1 + 2-LY2875358 LC |
| 37 | 237 | CD19-D1 + 2-LY2875358 HC |
| 38 | 238 | LY2875358 LC-CD19-D1 + 2 |
| 39 | 239 | LY2875358 HC-CD19-D1 + 2 |
| 40 | 240 | Trastuzumab scFv (VH/VL)-CD19-D1 + 2 |
| 41 | 241 | Trastuzumab scFv (VH/VL)-CD19-D1 + 2- |
| | | huIgGFc |
| 42 | 242 | CD19-D1 + 2-Trastuzumab scFv (VH/VL) |
| 43 | 243 | CD19-D1 + 2-Trastuzumab scFv (VH/VL)- |
| | | huIgGFc |
| 46 | 246 | human CD69 promoter-tGFP |
| 47 | 247 | human TNFalpha promoter-tGFP |
| 48 | 248 | mouse CD25 promoter-tGFP |
| 49 | 249 | NFAT element × 6 promoter-tGFP |
| 50 | 250 | CD19-ECD-Panitumumab HC |
| 51 | 251 | CD19-ECD-LY2875358 HC |
| 52 | 252 | CD19-ECD-MOC31 scFv (VH/VL) |
| 53 | 253 | CD19-ECD-LY2875358-scFv (VH/VL) |
| 54 | 254 | CD19-ECD-Panitumumab scFv (VH/VL) |
| 55 | 255 | CD19-ECD-Trastuzumab scFv (VH/VL) |
| 56 | 256 | CD19-ECD-huIgGFc-Trastuzumab scFv |
| | | (VH/VL) |
| 57 | 257 | Her2-ECD-Panitumumab scFv (VH/VL) |
| 58 | 258 | Her2-D4-Panitumumab scFv (VH/VL) |
| 63 | 263 | CD19-ECD-Leu16 scFv (VH/VL) |
| 64 | 264 | CD22-D123-FMC63 scFv (VH/VL) |
| 65 | 265 | CD22-D123-Leu16 scFv (VH/VL) |
| 66 | 266 | CMV promoter-tGFP |
| 67 | 267 | CD19-ECD-anti-EGFRvIII scFv (VL/VH) |
| 68 | 268 | CD22-D123-anti-EGFRvIII scFv (VH/VL) |
| 71 | 271 | FMC63 CAR-19 construct Flag-tagged-1 |
| 72 | 272 | FMC63 CAR-19 construct Flag-tagged-2 |
| 73 | 273 | CD19 FMC63 CAR and CMV-#42 |
| 74 | 274 | CD19 FMC63 CAR and CD25 promoter- |
| | | #42 |
| 75 | 275 | CD19 FMC63 CAR and CD69 promoter- |
| | | #42 |
| 76 | 276 | CD19 FMC63 CAR and TNF promoter-#42 |
| 77 | 277 | CD19 FMC63 CAR and NFAT promoter- |
| | | #42 |
| 78 | 278 | Leu16 scFv (VH/VL)-huIgGFc |
| 79 | 279 | Leu16 scFv (VH/VL) |
| 80 | 280 | Leu16 scFv (VL/VH)-huIgGFc |
| 81 | 281 | Leu16 scFv (VL/VH) |
| 82 | 282 | CD19-D1 + 2-Leu16 scFv (VH/VL)- |
| | | huIgGFc |
| 83 | 283 | CD19-D1 + 2-Leu16 scFv (VH/VL) |
| 84 | 284 | CD19-D1 + 2-Leu16 scFv (VL/VH)- |
| | | huIgGFc |
| 85 | 285 | CD19-D1 + 2-Leu16 scFv (VL/VH) |
| 86 | 286 | CD19-D1 + 2-MOC31 scFv (VH/VL) |
| 87 | 287 | CD19-D1 + 2-Ly2875358 scFv (VH/VL) |
| 88 | 288 | CD19 D1 + 2-Panitumumab scFv (VH/VL) |
| 89 | 289 | C11D5.3 scFv (VL/VH) |
| 90 | 290 | C11D5.3 scFv (VH/VL) |
| 91 | 291 | CD19-D1 + 2-C11D5.3 scFv (VL/VH) |
| 92 | 292 | CD19-D1 + 2-C11D5.3 scFv (VH/VL) |
| 93 | 293 | CD19-D1 + 2-huIgGFc-Trastuzumab |
| | | (VH/VL) |
| 94 | 294 | Bispecific CD19-D1 + D2-Trastuzumab scFv |
| | | (VH/VL)-Panitumumab scFv (VH/VL) |
| 95 | 295 | Bispecific CD19-D1 + D2-Trastuzumab scFv |
| | | (VH/VL)-Panitumumab scFv (VL/VH) |
| 96 | 296 | Bispecific Trastuzumab scFv- |
| | | Panitumumab scFv (VH/VL) |
| 97 | 297 | Bispecific Trastuzumab scFv- |
| | | Panitumumab scFv (VL/VH) |
| 98 | 298 | lentiviral CMV promoter- #42 |
| 99 | 299 | lentiviral CD25 promoter - #42 |
| 100 | 300 | lentiviral CD69 promoter - #42 |
| 101 | 301 | lentiviral TNFa promoter - #42 |
| 102 | 302 | lentiviral NFATx6 promoter - #42 |
| 103 | 303 | Trastuzumab scFv (VH/VL)-huIgGFc |
| 104 | 304 | CD19-D1 + 2-extended linker-Leu16 scFv |
| | | (VH/VL)-huIgGFc |
| 105 | 305 | CD19-D1 + 2-extended linker-Leu16 scFv |
| | | (VH/VL) |
| 106 | 306 | CD19-D1 + 2-huIgGFc-Leu16 scFv |
| | | (VH/VL) |
| 107 | 307 | Leu16 scFv (VH/VL)-CD19-D1 + 2- |
| | | huIgGFc |
| 108 | 308 | EF1a - #72 - T2A - #42 |
| 109 | 309 | EF1a - #42 - T2A - #72 |
| 110 | 310 | #98 EF1a promoter and CMV (variant) |
| 111 | 311 | #42 EF1a promoter (pCDH-EF1a) |
| 112 | 312 | CD19 full ECD |
| 113 | 313 | FMC63 CAR-Flag |
| 114 | 314 | FMC63 CAR |
| 115 | 315 | anti-CD19 FMC63 CAR heavy chain |
| 116 | 316 | anti-CD19 FMC63 CAR light chain |
| 117 | 317 | anti-FMC63 (anti-Id) scFv VH-VL- |
| | | Trastuzumab scFv-His |
| 118 | 318 | anti-FMC63 (anti-Id) scFv VL-VH- |
| | | Trastuzumab scFv-His |

[0379] In any of the embodiments described herein, a protein and/or construct described herein has an amino acid sequence having at least 80%, 85%, 90%, 91%, 92%, 93%, 94%, 95%, 96%, 97%, 98%, or 99% identity to a disclosed amino acid sequence, and/or is encoded by a nucleotide sequence having at least 80%, 85%, 90%, 91%, 92%, 93%, 94%, 95%, 96%, 97%, 98%, or 99% identity to a disclosed nucleotide sequence herein.

[0380] All publications, including GenBank sequences, cited herein are expressly incorporated by reference herein.

### EXEMPLIFICATION

### Example 1. Construction and Expression of Antibody-CD19 Fusion Proteins

[0381] Fusion proteins containing CD19 and either full-length antibodies or scFvs were produced using anti-EGFR monoclonal antibody panitumumab, humanized anti-c-MET monoclonal antibody LY2875358 (emibetuzumab), or anti-HER2 monoclonal antibody trastuzumab. The extracellular domain of CD19 lacking 13 amino acids at the C-terminus and including the two C2-type Ig domains of CD19 (“CD19-D1+D2”, which includes the non-coding and coding sequences of exons 1-4 in the CD19 gene) were fused to the full length antibodies in various orientations, as depicted schematically in FIG. 13. In some constructs only CD19 domain 1 (“CD19-D1”) or domain 2 (“CD19-D2”) was used for the fusion protein. In some constructs the full-length extracellular domain of CD19 (“CD19-ECD”; SEQ ID NO: 112) was used.

[0382] Panitumumab-CD19 fusion proteins were produced in 293T cells by expressing vectors containing nucleic acids encoding panitumumab-CD19 fusion proteins. Coding sequences for the heavy and light chains of panitumumab described herein were used to design synthetic gene sequences in pcDNA-1 derived vectors. The synthetic gene sequences encoded panitumumab antibody sequences in which the CD19 D1+D2 domain was fused, in frame, at either the N-terminus of the heavy chain, or at the C-terminus of the heavy chain, or at the N-terminus of the light chain, or at the C-terminus of the light chain.

[0383] LY2875358-CD19 fusion proteins were produced by expressing vectors containing nucleic acids encoding LY2875358-CD19 fusion proteins in 293T cells. Coding sequences for the heavy and light chains of LY2875358 (described herein) were used to design synthetic gene sequences in pcDNA-1 derived vectors. The synthetic gene sequences encoded LY2875358 antibody sequences in which the CD19 D1+D2 domain was fused, in frame, at either the N-terminus of the heavy chain, or at the C-terminus of the heavy chain, or at the N-terminus of the light chain, or at the C-terminus of the light chain. In some constructs only CD19-D1 or CD19-D2 was used for the fusion protein. In some constructs CD19-ECD was used.

[0384] The 293T cells were cultured to be at 90-95% confluence at the time of transfection. At Day 0, cells were seeded at 1×10e6 in 2 ml/well (6 well per plate), and cultured overnight. The cells reached ˜90% confluence on day 1. Vector DNAs encoding heavy and light chains were mixed with the transfection reagent. On day 1, 150 μl A serum-free OptiMEM™ (Gibco) was mixed with 10 μl Lipofectamine 2000™ (Invitrogen) and incubated at room temperature for 5 minutes (Part A). In another tube, 2.5 μg of each vector DNA (heavy and light chains) were mixed (Part B) then 150 μl serum-free OptiMEM™ was added. Parts A and B were then gently mixed and incubated at room temperature for 20 minutes. The transfection reagent was then added directly into the well with cells in 2 ml cell culture medium. The cell culture supernatant was harvested after 48 hours.

[0385] Expression levels of panitumumab-CD19 and LY2875358-CD19 fusion proteins were determined by Western blot analysis from cultures of cells expressing the fusion proteins. 1 ml of supernatant was taken from the cell cultures 48 hours after transfection. The cell culture media was mixed with 20 μl 50% rProtein A Sepharose Fast Flow slush in PBS (GE Healthcare) for 3 hours at room temperature, with gentle rocking. The protein-A beads, with captured antibodies bound, were spun down by centrifugation and washed with PBS. The wash step was repeated. Then, 20 μμl 2× Laemmli Sample buffer (Bio-Rad), including DTT as a reducing reagent, was added to remove any antibodies that had been captured by the beads. The lysates (10 μl) were loaded onto a 4-20% polyacrylamide gel from Bio-Rad in order to separate the proteins under reducing conditions. The heavy and light chains were identified by using a peroxidase-coupled anti-human IgG polyclonal antibody. The peroxidase signal was detected enzymatically using SuperSignal West Femto Maximum Sensitivity Substrate (Thermo Fisher), and the resulting bands were imaged using Chemi Doc MP Imaging System (Bio-Rad) and Image Lab software. Expression levels are depicted in FIGS. 14A and 14B. In FIGS. 14A and 14B, expression of the following constructs is shown: panitumumab heavy chain (SEQ ID NO:1) and panitumumab light chain (SEQ ID NO:4) (construct “1+4”); CD19-D1+2-panitumumab LC (SEQ ID NO:32) and panitumumab HC (SEQ ID NO:1) (construct “32+1”); CD19-D1+2-Panitumumab HC (SEQ ID NO:33) and panitumumab LC (SEQ ID NO:4) (construct “33+4”); Panitumumab LC-CD19-D1+2 (SEQ ID NO:34) and panitumumab HC (SEQ ID NO:1) (construct “34+1”); Panitumumab HC-CD19-D1+2 (SEQ ID NO:35) and panitumumab LC (SEQ ID NO:4) (construct “35+4”); CD19-D1+2-LY2875358 LC (SEQ ID NO:36) and LY2875358 HC (SEQ ID NO:7) (construct “36+7”); CD19-D1+2-LY2875358 HC (SEQ ID NO:37) and LY2875358 LC (SEQ ID NO:10) (construct “37+10”); LY2875358 LC-CD19-D1+2 (SEQ ID NO:38) and LY2875358 HC (SEQ ID NO:7) (construct “38+7”); LY2875358 HC-CD19-D1+2 (SEQ ID NO:39) and LY2875358 LC (SEQ ID NO:10) (construct “39+10”); LY2875358 HC (SEQ ID NO:7) and LY2875358 LC (SEQ ID NO:10) (construct “7+10”).

[0386] As shown in FIG. 14, CD19-containing heavy and light chains were detectible and ran at a higher molecular weight than the unmodified heavy and light chains (compare, e.g., lanes 1 and 3 on FIG. 14A (panituzumab) and lanes 7 and 10 on FIG. 14B (LY2875358)).

[0387] scFv-CD19 fusion proteins were produced using scFv from anti-HER2 antibody trastuzumab and CD19 fused to the N-terminus or the C-terminus of the scFv (i.e., the linked VH and VL sequences of the parental antibody), as depicted schematically in FIG. 15. The scFv-CD19 fusion proteins were designed to include a C-terminal HIS tag (e.g., constructs #40 and 42) or a hinge-CH2-CH3 from human IgG (“huIgGFc”) (e.g., constructs #41 and 43). In some constructs only CD19-D1 or CD19-D2 was used for the fusion protein. In some constructs CD19-ECD was used.

[0388] The scFv-CD19 fusion proteins were expressed in 293T cells using the same methods as described above, except that only one vector encoding the sequences to be expressed was used, as the construct is linear. The expression levels of the scFv-fusion proteins were determined by Western blot analysis. The Fc-tagged scFv fusion proteins were immunoprecipitated using protein-A coated beads, run on a reducing gel, and detected via anti-human IgG peroxidase staining and enzymatic detection. The HIS-tagged scFv fusion proteins were immunoprecipitated using anti-HIS resin (R&D Systems) and detected with an anti-HIS polyclonal antibody-peroxidase conjugate and enzymatic detection. The expression of trastuzumab scFv-CD19 fusion proteins is shown in FIG. 16.

### Example 2. Antibody-CD19 Fusion Proteins are Recognized by Anti-CD19 Antibody

[0389] The ability of an anti-CD19 antibody (FMC63) to bind to the various antibody-CD19 fusion proteins described in Example 1 was determined using a variety of methods to demonstrate specific binding.

[0390] FIGS. 17A-17D depict binding of panitumumab-CD19 fusion proteins described in Example 1 to FMC63. ELISA plates (Pierce) were coated with 1 μg/ml FMC63 anti-human CD19 antibody (Millipore) at 4° C. overnight. The plate was blocked with 0.3% NF dry milk in TBS for 1 hour at room temperature. Cell culture supernatants were added directly to the wells in ELISA buffer followed with a 1:3 to 1:2187 dilution, in series. The ELISA plates were gently washed with TBST (50 mM Tris, 150 mM NaCl, 0.05% Tween20) ELISA buffer, three times, and then peroxidase-conjugated polyclonal anti-human IgG was added to detect the bound human antibodies. In this assay format, the human antibodies are retained via binding of CD19 to the FMC63 coated on the plate surface. Additional controls were run to demonstrate specificity (depicted in FIG. 18). “mAb only” indicates addition of the parental antibody that does not carry a CD19 fusion, and “mock Tfx” indicates the addition of media from wells that were treated with the transfection protocol, but without any added vectors. The binding was demonstrated to be above background for all four fusion proteins tested (corresponding to N and C terminal fusions of CD19 to the heavy and light chains; FIG. 18). The intensity of binding appeared to reflect the amount of protein expression as was demonstrated on the Western blots (FIG. 14A).

[0391] FIGS. 19A-19D depict binding of LY2875358-CD19 fusion proteins described in Example 1 to FMC63 using the same methods as described for the panitumumab-CD19 fusion proteins. As shown in FIG. 20, binding of FMC63 to LY2875358-CD19 fusion proteins was specific when compared to the “mAb only” and “mock Tfx” controls, as described for the panitumumab-CD19 fusion protein example.

[0392] This example demonstrates that an anti-CD19 antibody is able to recognize antibody-CD19 fusion proteins. FIG. 21 summarizes expression of, and FMC63 binding to, the antibody-CD19 fusion proteins described in Example 1.

[0393] FIG. 22 depicts binding of the CD19-D1+2-Trastuzumab scFv (VH/VL) fusion protein (construct #42 described in Example 1) to an FMC63-coated ELISA plate. The bound scFv-fusion protein was detected with a peroxidase coupled anti-HIS antibody. Note that 3B10, an anti-CD19 mAb that binds to the C-terminus of CD19 (which is lacking in construct #42), did not bind.

### Example 3. LY2875358-CD19 Fusion Proteins Bind to A549 Carcinoma Cells and Bind to Anti-CD19 Antibody

[0394] The ability of a LY2875358-CD19 fusion protein (construct “37+10” described in Example 1) to bind to A549 carcinoma cells and to FMC63 (anti-CD19 antibody) was tested by Fluorescence Activated Cell Sorting (aka “FACS” or “Flow Cytometry”). A549 cells express the cancer cell-associated protein c-MET that is specifically recognized by LY2875358. The LY2875358 HC (SEQ ID NO:7) and LY2875358 LC (SEQ ID NO:10) were expressed in 293T cells and the cell culture supernatant was incubated with A549 cells. After a 30 minute incubation on ice, the cells were washed with FACS buffer (PBS with 1% BSA and 0.1% sodium azide). The bound antibody was then detected by incubating the cells with an anti-human IgG-Fluorescein Isothiocyanate (FITC) conjugate, which gives off a fluorescent signal when activated by a specific laser in the flow cytometer. The resulting FACS signal can be seen as an increase in mean fluorescence intensity (MFI) detected by the instrument, causing the signal to shift higher (a right-hand shift as depicted in FIG. 23A). A similar shift was detected when the supernatant containing construct “37+10” fusion protein was incubated with A549 cells. Importantly, construct “37+10” fusion protein bound to A549 cells could be detected with the anti-CD19 antibody FMC63, either as a PE-conjugate, where the phycoerythrin (PE) is activated by the Flow Cytometer, or as a purified antibody subsequently bound by an anti-human IgG FITC (FIG. 23B-C). These results show that the LY2875358-CD19 fusion protein bound to the A549 cells by recognition of c-MET by the antibody binding domains, and was recognized in turn by FMC63 anti-CD19 antibody. Thus both the antibody binding domain and CD19 were intact. This example demonstrates that a LY2875358-CD19 fusion protein was able to bind to cells expressing c-MET and to an anti-CD19 antibody.

### Example 4. Trastuzumab scFv-CD19 Fusion Proteins Bind to Her2 and to Anti-CD19 Antibody

[0395] The ability of two trastuzumab scFv-CD19 fusion proteins (CD19-D1+2-Trastuzumab scFv (VH/VL); construct #42 described in Example 1; and CD19-D1+2-Trastuzumab scFv (VH/VL)-huIgGFc; construct #43 described in Example 1) to bind to Her2 and to anti-CD19 antibody (FMC63) was determined. ELISA plates were coated with 1 μg/ml FMC63 anti-CD19 antibody and the cell culture supernatant containing HIS tagged construct #42 or Fc-fusion construct #43 was added in different dilutions. After incubation for 1 hour at room temperature and washing, purified biotinylated HER2 protein (ACRO Biosystems) was added at a concentration of 1 μg/ml for an additional hour at room temperature, then the plate was washed again and streptavidin-peroxidase was added to detect the bound biotin conjugated to HER2 (FIG. 24A, B). In a further set of experiments to demonstrate specificity, irrelevant biotinylated proteins were substituted for biotinylated HER2 (“bio-EpCAM”, “bio-EGFR”), or the unconjugated form of trastuzumab scFv was used in place of a trastuzumab scFv-CD19 fusion protein (“#17-bio-HER2”), or media alone was added in place of the trastuzumab scFv-CD19 fusion proteins (“medium-bio-HER2”). The results demonstrated the specificity of the binding of biotinylated HER2 to the trastuzumab scFv-CD19 fusion proteins captured on the ELISA plate by anti-CD19 (FIG. 25A, B). As shown in FIG. 24A, construct #42 bound to both FMC63 and to Her2 antigen. FIG. 24B demonstrates that construct #43 fusion protein also bound to both FMC63 and to Her2 antigen. This example demonstrates that trastuzumab scFv-CD19 fusion proteins were able to bind to Her2 antigen and to an anti-CD19 antibody.

### Example 5. ELISA Analysis of Various Fusion Proteins

### Methods

[0396] ELISA was performed on various fusion proteins described below. Briefly, 96 well plates (Pierce, Cat# 15041) were coated with 1.0 μg/ml reagent in 0.1 M carbonate, pH 9.5 for 0/N at 4C. The plates were then blocked with 0.3% nonfat dry milk (NFD) in TBS (200 μl/well) for 1 hr at RT. Plates were then washed 3× with wash buffer (1× TBST: 0.1 M Tris, 0.5 M NaCl, 0.05% Tween20). Titrations were performed from undiluted cell culture supernatant or purified protein at 1.0 μg/ml with serial 3× dilutions, 100 μl per well and incubate for 1 h at RT. Dilution buffer is 1% BSA in lx TBS (0.1 M Tris, 0.5 M NaCl) followed by washing 3x with wash buffer. Secondary reagents were added (if needed) such as Biotinylated-reagents at 1 μg/ml concentration at RT for 1 hour. HRP-conjugated reagents were added at 1:2000, applied 100 μl per well, incubated at RT in dark for 1 hr. 100 μl 1-Step Ultra TMB-ELISA (Thermo Fisher, Prod#34028) was added per well. Plates were read at 405 nm when color had developed.

[0397] The following reagents were used:
[0398] Human CD19 (20-278) protein, Fc Tag: ACRO Biosystems, Cat# CD9-H5255
[0399] Human CD19 (20-291) protein, His Tag: ACRO Biosystems, Cat# CD9-H5226
[0400] Anti-CD19 (3B10): NOVUS, Cat# NBP2-46116
[0401] Anti-CD19 (MFC63): Millipore, Cat# MAB1794
[0402] Human Her2/ErbB2 Protein, Fc Tag: ACRO Biosystems, Cat# HE2-H5253
[0403] Human EGF R Protein, Fc Tag: ACRO Biosystems, Cat# EGR-H5252
[0404] Human BCMA Protein, Fc Tag : R&D Systems. Cat#193-BC-050
[0405] Goat anti-human IgG (H+L) secondary antibody: Thermo Fisher, Cat# 31130
[0406] 6×-His Epitope tag antibody: Thermo Fisher, Cat# PA1-983B
[0407] 6×-His epitope tag antibody, HRP conjugate: Thermo fisher, Cat# MA 1-21315-HRP
[0408] Pierce high Sensitivity Streptavidin-HRP: Thermo Fisher, Cat# 21130
[0409] Goat anti-Mouse IgG (H+L), HRP conjugated: Jackson ImmunoResearch, Cat# 115-035-062
[0410] Goat anti-Human IgG (H+L), HRP conjugated: Jackson ImmunoResearch, Cat# 109-035-088

[0411] The following table lists the various fusion proteins assayed in this Example:

| | | Amino Acid | Nucleotide |
|---|---|---|---|
| Construct # | Description | SEQ ID NO: | SEQ ID NO: |
| 28 | CD19-D1 + 2 | 28 | 228 |
| 29 | CD19-D1 + D2-huIgGFc | 29 | 229 |
| 33 + 4 | CD19-D1 + 2-Panitumumab | 33/4 | 233/204 |
| | HC and Panitumumab LC | | |
| 42 | CD19-D1 + 2-Trastuzumab | 42 | 242 |
| | scFv (VH/VL) | | |
| 43 | CD19-D1 + 2-Trastuzumab | 43 | 243 |
| | scFv (VH/VL)-huIgGFc | | |
| 52 | CD19-ECD-MOC31 scFv | 52 | 252 |
| | (VH/VL) | | |
| 53 | CD19-ECD-LY2875358- | 53 | 253 |
| | scFv (VH/VL) | | |
| 54 | CD19-ECD-Panitumumab | 54 | 254 |
| | scFv (VH/VL) | | |
| 55 | CD19-ECD-Trastuzumab | 55 | 255 |
| | scFv (VH/VL) | | |
| 56 | CD19-ECD-huIgGFc- | 56 | 256 |
| | Trastuzumab scFv | | |
| | (VH/VL) | | |
| 57 | Her2-ECD-Panitumumab | 57 | 257 |
| | scFv (VH/VL) | | |
| 58 | Her2-D4-Panitumumab | 58 | 258 |
| | scFv (VH/VL) | | |
| 63 | CD19-ECD-Leu16 scFv | 63 | 263 |
| | (VH/VL) | | |
| 64 | CD22-D123-FMC63 scFv | 64 | 264 |
| | (VH/VL) | | |
| 65 | CD22-D123-Leu16 scFv | 65 | 265 |
| | (VH/VL) | | |
| 67 | CD19-ECD-anti-EGFRvIII | 67 | 267 |
| | scFv (VL/VH) | | |
| 68 | CD22-D123-anti-EGFRvIII | 68 | 268 |
| | scFv (VH/VL) | | |
| 82 | CD19-D1 + 2-Leu16 scFv | 82 | 282 |
| | (VH/VL)-huIgGFc | | |
| 83 | CD19-D1 + 2-Leu16 scFv | 83 | 283 |
| | (VH/VL) | | |
| 89 | C11D5.3 scFv (VL/VH) | 89 | 289 |
| 90 | C11D5.3 scFv (VH/VL) | 90 | 290 |
| 91 | CD19-D1 + 2-C11D5.3 scFv | 91 | 291 |
| | (VL/VH) | | |
| 92 | CD19-D1 + 2-C11D5.3 scFv | 92 | 292 |
| | (VH/VL) | | |
| 93 | CD19-D1 + 2-huIgGFc- | 93 | 293 |
| | Trastuzumab (VH/VL) | | |
| 94 | Bispecific CD19-D1 + D2- | 94 | 294 |
| | Trastuzumab scFv | | |
| | (VH/VL)-Panitumumab | | |
| | scFv (VH/VL) | | |
| 95 | Bispecific CD19-D1 + D2- | 95 | 295 |
| | Trastuzumab scFv | | |
| | (VH/VL)-Panitumumab | | |
| | scFv (VL/VH) | | |
| 96 | Bispecific Trastuzumab | 96 | 296 |
| | scFv-Panitumumab scFv | | |
| | (VH/VL) | | |
| 97 | Bispecific Trastuzumab | 97 | 297 |
| | scFv-Panitumumab scFv | | |
| | (VL/VH) | | |

### Results

[0412] FIG. 26 shows fusion proteins captured on anti-His antibody-coated ELISA plates. As shown in FIG. 26, the binding capabilities of C-terminal-His-tagged CD19-scFv fusion proteins were demonstrated (FIG. 26, arrows). CD19-ECD-MOC31 scFv (VH/VL) (construct #52) and CD19-ECD-Leu16 scFv (VH/VL) (construct #63) were captured onto the ELISA plate via an antibody directed to the C-terminal His tag. Once bound, the fusion proteins were detected using an HRP-coupled anti-CD19 monoclonal antibody 3B10 that recognizes the CD19 protein. Thus, a positive signal demonstrated that both the C-terminus and N-terminus of the fusion protein were intact and capable of binding.

[0413] FIG. 27 shows fusion proteins captured on anti-His antibody-coated ELISA plates. As shown in FIG. 27, the binding capabilities of C-terminal-His-tagged CD19-scFv fusion proteins were demonstrated. A His-tagged CD19 protein (D1+D2; construct #28) was created as a positive control for CD19 recognition. The fusion proteins were captured onto the ELISA plate via an antibody directed to the C-terminal His tag. Once bound, the fusion proteins were detected using the anti-CD19 mouse monoclonal antibody FMC63. Bound FMC63 was detected using an HRP-coupled polyclonal antibody to the murine IgG Fc domain. Thus, a positive signal demonstrated that both the C-terminus and N-terminus of the fusion protein were intact and capable of binding.

[0414] FIG. 28 shows fusion proteins captured on anti-FMC63 (anti-CD19)-coated plates, then detected with anti-His-HRP. As shown in FIG. 28, the binding capabilities of C-terminal-His-tagged CD19-scFv fusion proteins were demonstrated. The fusion proteins were captured onto the ELISA plate coated with the anti-CD19 mouse monoclonal antibody FMC63. FMC63 captures the fusion proteins by binding the N-terminal CD19 protein. Once bound, the fusion proteins were detected using the HRP-coupled anti-His antibody that recognizes the c-terminal His tag on the fusion proteins. Thus, a positive signal demonstrated that both the C-terminus and N-terminus of the fusion protein were intact and capable of binding.

[0415] FIGS. 65A, 65B, and 65C depict binding of additional CD19-containing fusion proteins (constructs #42, #43, #56, #82, #83, #91, #92, #93, #94) to an FMC63-coated ELISA plate as described for FIG. 28. The bound fusion proteins were detected with a peroxidase coupled anti-HIS antibody or a peroxidase coupled anti-hIgG antibody. FIG. 65D demonstrates estimates of the fusion protein construct titers by titration against purified construct #42.

[0416] FIG. 65C demonstrates that the CD19 bispecific fusion protein (construct #94) was expressed, bound to the anti-CD19 antibody FMC63, and was detected by an anti-His antibody binding to the C-terminal His tag. This indicates that the protein was intact and that the N- and C- termini were present. The controls show strong binding by the fusion protein containing the Trastuzumab scFv only, (construct #42), and by the Trastuzumab scFv-huIgGFc fusion protein (construct #43). Moving the huIgGFc to a position just C-terminal to the CD19 protein domain resulted in fusion proteins with reduced binding to FMC63 mAb (constructs #56 and #93).

[0417] FIG. 29 shows detection of CD19-anti-Her2 trastuzumab scFv-human Fc fusion proteins (constructs #29, 43, 56) in a “sandwich ELISA” format. The human Fc domain was bound to the plate using a polyclonal anti-human IgGFc polyclonal antibody. Once bound the fusion proteins were detected using a different anti-human IgGFc polyclonal antibody coupled to HRP. The results demonstrated that these fusion proteins were expressed and that the human Fc domain was present.

[0418] FIGS. 30 and 31 show fusion proteins detected by various ELISA formats. FIG. 30 shows the capture by anti-CD19 monoclonal antibody FMC63 of multiple fusion proteins (constructs #52, 53, 54, 63) and their detection by anti-His antibody coupled to HRP. In addition, FIG. 31 shows that the CD19-ECD-Leu16 scFv (VH/VL) fusion protein (construct #63) was detected using the reverse format, in which the protein was captured via the C-terminal His tag and then detected by mouse monoclonal antibody FMC63 anti-CD19 and then anti-mouse IgG-HRP. These results demonstrate that the desired binding properties of these fusion proteins were maintained.

[0419] FIG. 32 shows results for fusion proteins that incorporate CD22 protein domains, or anti-EGFRvIII scFv. FIG. 32 demonstrates that two formats in which a CD22 protein, a truncated and optimized form encoding the first three N-terminal domains of the extracellular portion of the protein and specific mutations, can be fused to scFvs successfully. Constructs #64 and #65 were captured via the C-terminal His tag, and CD22 at the N-terminus was detected. In contrast an identical CD22 protein fused to an anti-EGFRvIII protein was not successfully detected (#68) and neither was a CD19 protein fused to anti-EGFRvIII scFv (#67).

[0420] FIG. 33 shows results for a protein-antibody fusion protein (construct “33+4”) and protein-scFv fusion proteins (constructs #57 and 58) derived from the same antibody, panitumumab The plate was coated with anti-His antibody, and bound protein was detected with biotinylated-EGFR protein and streptavidin-HRP. FIG. 33 demonstrates that panitumumab and panitumumab-derived scFv fusion proteins were competent to bind their antigenic ligand, EGFR, when bound to the plate by the C-terminal His tag. FIG. 33 also shows that Her2 extracellular domains (full-length or domain 4 (D4)-only) do not disrupt panitumumab and panitumumab-derived scFv binding function. Her2 fusion proteins were similar in this respect to the CD19 fusion proteins.

[0421] FIGS. 66A-66D show the capture of various fusion proteins (construct #42, #52, #89, #90, #91, #92, #94, #95, #96, #97) by plate bound antigen and their detection by anti-His antibody coupled to HRP. Human BCMA-Fc (Fig.66A), Her2-Fc (#42, #94) or EGFR-Fc (#94, #57) (FIG. 66B), and Her-2-Fc or EGFR-Fc, as indicated (FIG. 66D), were bound to the plate using a polyclonal anti-human IgGFc polyclonal antibody. Supernatants generated from transfections with the indicated fusion proteins (purified or expressed) were added to the coated plate and allowed to incubate. After washing, bound protein was detected using a HRP-conjugated anti-HIS antibody. This demonstrates the fusion proteins maintain the ability to bind their respective antigens. Furthermore, fusion protein #94 (FIGS. 66B, 66C) and fusion proteins #95, #96, and #97 (FIGS. 66C-66D), were captured via the encoded scFvs to Her2 and to EGFR, demonstrating that both scFv were functional in the produced fusion protein.

### Example 6. Analysis of Target Affinities of Various Fusion Proteins

[0422] The binding affinities of the CD19-D1+2-Trastuzumab scFv (VH/VL) fusion protein (construct #42) for binding of the CD19 protein to an anti-CD19 monoclonal antibody and for binding of the Trastuzumab scFv to purified Her2 protein were assessed.

### Methods

[0423] A 96-well ELISA plate was coated with 2 μg/ml of anti-CD19 monoclonal antibody FMC63 in PBS. The plate was left to incubate overnight at 4° C. The coated plate was washed with PBS then blocked with PBS/0.3% nonfat dry milk (NFD) for 30 minutes at 37° C. The purified CD19-D1+2-Trastuzumab scFv (VH/VL) fusion protein was diluted in PBS/NFD and added at varying amounts from 0.005 μg/ml to 1 μg/ml, covering more than three logs of final concentration. The fusion protein was allowed to incubate for 1 hour at 37° C., then the plate was washed and the HRP-coupled anti-His antibody was added for 30 minutes at 37° C., then used for enzymatic detection, following the manufacturer's directions. The apparent EC50 was calculated using the 4-parameter curve fitting function of Softmax software.

[0424] The binding affinity of the FMC63-bound CD19-D1+2-Trastuzumab scFv (VH/VL) fusion protein to Her2 was then assessed. The ELISA plate was coated, washed and incubated with the fusion protein as described above. Then, a titration of purified Her2-Fc was added to the wells and allowed to incubate for 1 hour at 37° C. After a wash with PBS, HRP-coupled anti-hIgGFc antibody was added and incubated for 30 minutes at 37° C. The HRP was detected by enzymatic reaction following the manufacturer's instructions.

[0425] The binding affinity for Her2 of the CD19-D1+2-Trastuzumab scFv (VH/VL) fusion protein was also compared to the binding affinity for Her2 of the parental (trastuzumab) scFv (construct #16). The ELISA plate was coated with 2 μg/m1HER2-hFc in PBS overnight at 4° C. The plate was washed with PBS, then blocked with PBS/NFD for 1 hour at 37° C. After another wash with PBS, the proteins or supernatants were added in a titration to the plate and allowed to bind for 1 hour at 37° C. The plate was washed again with PBS, and HRP-coupled anti-His antibody was added for 30 minutes at 37° C., then developed using the manufacturer's instructions. The apparent EC50s were calculated as described above.

### Results

[0426] The purified CD19-D1+2-Trastuzumab scFv (VH/VL) fusion protein bound to the FMC63 antibody with an apparent EC50 of 0.14 nM (FIG. 34), which was very similar to the EC50 of 0.4 nM described for purified CD19 binding to the FMD63-derived CAR construct scFv (Nicholson, I. C. et al. 1998. Mol. Immunol., 34: 1157-1165). The binding affinity of the FMC63-bound CD19-D1+2-Trastuzumab scFv (VH/VL) fusion protein to Her2 was assessed in the ELISA format. As shown in FIG. 35, the apparent affinity in this format was 0.18 nM (the circles show the purified CD19 protein control, which did not bind Her2 and was therefore not detected). The affinity of the scFv in the fusion protein to the expressed anti-Her2 scFv was compared. The apparent affinities of the protein supernatants were very similar for Her2, with the expressed fusion protein binding with an apparent affinity of 0.33 nM compared to the expressed scFv apparent affinity of 0.77 nM (FIG. 36). The affinity of the purified fusion protein was 0.4 nM, showing that purification did not impact the binding capacity of the fusion protein for Her2 (FIG. 36). These affinities are very similar to that published for the trastuzumab scFv (0.3 nM, Zhao et al. 2009 J. Immunol. 183:5563-5574).

### Example 7. Analysis of Various Fusion Proteins by Flow Cytometry

### Methods

[0427] If necessary, cells to be analyzed were detached with 0.5 mM EDTA in PBS followed by washing 2x with ice cold FACS buffer (1% BSA+0.1% Sodium Azide in PBS). Cells were resuspended in FACS buffer (5×10⁵/100 μl/test). Purified protein (up to 10 μg/ml as the final concentration), or 200 μl supernatant, was added to cells suspended in 100 μl FACS buffer followed by incubation at 4° C. for 30 minutes. After washing 2× with ice cold FACS buffer, cells were resuspended in FACS buffer (5×10⁵/100 μl/test) and incubated with detection antibody in FACS buffer at 4° C. for 30 minutes. If a secondary antibody was needed, cells were washed and the secondary antibody added at the desired concentration for 30 minutes at 4° C., for the detection step. Samples were then washed 2× with ice cold FACS buffer, cells were fixed with 2% paraformadehyde in PBS, and analyzed on the Accuri Flow Cytometer (BD Biosciences).

[0428] Several constructs described in Example 5 were assayed. Additional constructs are listed in the following table:

| | | Amino Acid | Nucleotide |
|---|---|---|---|
| Construct # | Description | SEQ ID NO: | SEQ ID NO: |
| 84 | CD19-D1 + 2-Leu16 scFv | 84 | 284 |
| | (VL/VH)-huIgGFc | | |
| 85 | CD19-D1 + 2-Leu16 scFv | 85 | 285 |
| | (VL/VH) | | |

### Results

[0429] Stable transfectant line 293-CD20 was incubated with 200 μl fusion protein CD19-ECD-Leu16 scFv (VH/VL) (construct #63) then anti-CD19 monoclonal antibody FMC63-PE-conjugated (aka “293-CD20 +#63 +FMC63-PE”). As shown in FIG. 37, a small positive shift was observed in the Flow Cytometry (FACS) profile relative to controls.

[0430] FIG. 38 shows analysis of 293-CD20 +200 μ1 fusion protein CD19-D1+2-Leu16 scFv (VH/VL) (construct #83). FMC63-PE was used to detect the fusion protein bound to the 293-CD20 cells. The results showed a better shift in FACS profile than did #63. This is because the truncated CD19 protein (D1+D2, i.e., exons 1 through 4 encoded, and lacking the last 13 amino acids of the extracellular domain) binds more effectively to FMC63 in this fusion protein format (comparing #63 and #83) than does the full length extracellular domain. Additionally, FIG. 67A shows analysis of varying concentrations of construct #83 bound to 293-CD20 cells detected by a-HIS-PE. FIG. 67B shows analysis of varying concentrations of construct #83 bound to 293-CD20 cells detected by FMC63-PE. These results further support the conclusion that the fusion protein successfully bound to CD20 on the cell surface and presented the CD19 domains to be recognized by the detection antibody.

[0431] FIG. 39 shows analysis of 293-CD20+200 μl fusion protein CD19-D1+2-Leu16 scFv (VL/VH) (construct #85). FMC63-PE was used to detect the fusion protein bound to the 293-CD20 cells. This result showed a fusion protein in which the leul6 scFv was encoded in reverse of #83: thus #85 encodes VL and then VH whereas #83 encodes VH and then VL. The VL-VH leu16 scFv did not bind to the cell, and therefore CD19 (the N-terminal component of the fusion protein) was not detected.

[0432] FIG. 40 shows analysis of 293-CD20+200 μl fusion protein CD19-D1+2-Leu16 scFv (VH/VL)-huIgGFc (construct #82). Anti-hulgG-FITC antibody was used to detect the fusion protein bound to the 293-CD20 cells. FIG. 41 shows analysis of anti-hulgG-FITC negative control: 293-CD20 cells+anti-hulgG-FITC antibody (2 μl). This experiment demonstrated that CD19-D1+2-Leu16 scFv (VH/VL)-huIgGFc (FIG. 40) bound at least 1-log over the negative control (FIG. 41) by mean fluorescence intensity (MFI) and that 91.7% of the 293-CD20 cells stained positively in the FACS profile. This demonstrates that the fusion protein that was linked to a human IgG Fc (hinge-CH2—CH3) successfully bound to CD20 on the cell surface and presented the C-terminal human IgGFc domain to be recognized by the detection antibody (anti-human IgG-FITC-conjugated). Additionally, FIG. 68A shows analysis of varying concentrations of construct #82 bound to 293-CD20 cells detected by a-hIgG-FITC. FIG. 68B shows analysis of varying concentrations of construct #82 bound to 293-CD20 cells detected by FMC63-PE. This results further support the result that the fusion protein that was linked to a human IgG Fc (hinge-CH2-CH3) successfully bound to CD20 on the cell surface and presented the C-terminal IgGFc domain to be recognized by the detection antibody.

[0433] FIG. 42 shows analysis of 293-CD20+200 μl fusion protein CD19-D1+2-Leu16 scFv (VL/VH)-huIgGFc (construct #84). Anti-hulgG-FITC antibody was used to detect the fusion protein bound to the 293-CD20 cells. This experiment showed that, as with the fusion protein of construct #85, the scFv could not be successfully encoded as VL-VH in this fusion protein format.

[0434] FIG. 43 shows analysis of 293-CD20+200 μl fusion protein CD22-D123-Leu16 scFv (VH/VL) (construct #65)+anti-His-PE antibody. FIG. 43 demonstrates that fusion protein CD22-D123-Leu16 scFv (VH/VL), in which the first three domains of CD22 (which were further mutated) were fused to the Leu16 scFv, was detected on the surface of 293-CD20 cells via an antibody to the C-terminal His tag.

[0435] FIGS. 44-46 demonstrate that a fusion protein bridges trastuzumab to Her2-negative/EGFR-positive cells via EGFR binding by the panitumumab scFv. FIG. 44 shows detection control for Her2-A431 cells+Trastuzumab-PE, showing the background level of binding (A431 cells are Her2-low/negative). FIG. 45 shows analysis of A431+fusion protein Her2-ECD-Panitumumab scFv (VH/VL) (construct #57)+PE-conjugated Trastuzumab. FIG. 46 shows analysis of A431+fusion protein Her2-D4-Panitumumab scFv (VH/VL) (construct #58)+PE-conjugated Trastuzumab. These results demonstrate that the Her2-anti-EGFR scFv fusion proteins bound to an EGFR-positive cell and presented Her2 such that it was, in turn, bound by the anti-Her2 monoclonal antibody trastuzumab.

[0436] FIGS. 73-76 further demonstrate that fusion proteins can bridge antigen binding domains with other antigen binding domains. 293T cells were transiently transfected with HER2 or EGFR cDNA expression constructs (Genscript) using the lipofectamine 2000 reagent (ThermoFisher), following the manufacturer's instructions. 48 hours post transfection the cells were gently removed from the tissue culture plate using an EDTA solution. After being washed with FACs buffer, the transfected cells were incubated with supernatants containing indicated expressed fusion proteins. All incubations were performed at 4° C. After washing the cells in cold FACs buffer, 2ug/ml of either HER2-huIgGFc or EGFR-huIgGFc were added and incubated with the cells. The bound fusion proteins were detected with anti-huIgGFc-FITC conjugated antibody (Jackson immunoResearch Laboratories, cat #: 100-096-098) on a flow cytometer (Accuri, BD Biosciences).

[0437] FIGS. 73A and 73B show control samples that were stained with anti-EGFR or anti-HER2 antibodies to confirm expression. FIGS. 74A-74D show the fusion protein expressed by construct #43 binding to 293T-Her2 expressing cells. An increase in signal was noted when either a fluorescently labeled anti-CD19 antibody (FMC63-PE) was present (FIG. 74A vs. 74C) or a fluorescently labeled anti-human IgG-Fc (anti-hulgG- Fc-FITC) (FIG. 74B vs. 74D). FIGS. 75A-75D show binding of construct #94, and #95 to 293T-Her2 expressing cells. An increase in fluorescent signal was noted for fusion protein #94 when recombinant Fc tagged EGFR (EGFR-Fc) was incubated with cells bound to fusion protein #94 demonstrating that both anti-HER2 and anti-EGFR scFv were functional in the expressed fusion protein. In contrast, construct #95, in which the anti-EGFR scFv is included as VL/VH instead of VH/VL, appeared to bind poorly if at all to the HER2-positive cells. FIGS. 76A and 76B demonstrate binding of fusion protein #94 to 293T-EGFR expressing cells as detected via purified soluble HER2-Fc and detection of the hulgG-Fc.

### Example 8. CAR19 T Cell Targeting and Activation by Fusion Proteins

[0438] The activation and cytotoxicity of CAR19 T cells in the presence of various fusion proteins derived from the expression of specific constructs (described in Example 5) and target cell lines described below was assessed.

### Methods

### 1. CAR19 T Cell Targeting BT474 Cells by Fusion Proteins Binding Her2

[0439] BT474 cells were used as Her2 expressing target cells. The following samples, expressed by the indicated constructs, were run in duplicate including:

BT474+construct #42 fusion protein+CAR-T
BT474+construct #28 protein+CAR-T

### BT474+CAR-T

[0440] BT474+construct #42 fusion protein or construct #28 protein
BT474 only
CAR-T +construct #42 fusion protein or construct #28 protein
CAR-T only

[0441] On day 1 the tumor cell line BT474 was seeded at 1×10⁴ per well of a flat-bottom 96 well plate (Thermo Fisher, Cat# 130188) in cell culture media (RPMI 1640, 10% FBS). One plate was seeded for 24 hour culture and analysis and a second plate for 48 hour culture and analysis. On day 2, the fusion protein of construct #42 (described in Example 5) or control protein (construct #28 described in Example 5) were added at 0.5 μg/well where indicated, then left to incubate at 37° C. for 1 hour using the cell culture incubator.

[0442] CAR-CD19-directed-T cells (from Promab) were freshly thawed from pre-aliquoted vials kept in liquid nitrogen and washed once with medium to remove DMSO. The CAR19 T cells were then added to the 96 well plate where indicated, using a T cell:target cell (aka effector:target) cell ratio of 10:1 or 1:1, where the target was the BT474 cells.

[0443] On day 3, the 24 hour culture plate was harvested for analysis. The cell culture supernatant was removed and frozen at -20° C. for later Interferon gamma measurement. The plates were gently washed ×2 with RPMI 1640, then 100 μl media was added to each well before performing the XTT cytotoxicity assay. On day 4, the 48 hour culture plate was harvested for analysis using the exact same procedure as used for the 24 hour plate.

### XTT Cell Proliferation Assay (ATCC, Cat# 30-1011K)

[0444] An aliquot of the XTT reagent and the activation reagent was rapidly thawed at 37° C. prior to use. 0.1 ml of activation reagent was then added to 5.0 ml of the XTT reagent. 50 μl of the activated −XTT solution was then added to each well. The plate was placed in the cell culture incubator for 2-4 hours and monitored for color development. The absorbance of the plate was read at wavelength 450 nm. The % cell death (aka cytotoxicity) was calculated as follows:

% killing=[1-OD(experimental wells-corresponding number of T cells)/OD (tumor cells without T cell-medium)]×100

### Interferon Gamma Concentration Assay by ELISA

[0445] A 96 well plate (Pierce, product #15041) was coated with 1.0 μg/ml mouse anti-human IFNγ (BD Pharmingen, Cat# 551221) in 0.1 M carbonate buffer, pH 9.5, overnight at 4° C. The plate was blocked with 0.3% non-fat dry milk solution in tris-buffered saline (TBS) using 200 μl/well for 1 hour at room temperature. The plate was washed ×3 with wash buffer (1×TBS/Tween: 0.1 M Tris, 0.5 M NaCl, 0.05% Tween20). 100 μl culture supernatant from the 24 hour or 48 hour culture plates (see above) were added to the ELISA plate. A titration of recombinant human IFNγ (Thermo Fisher, Cat# RIFNG100) was also performed in the same plate from 300 ng/ml with serial 3× dilutions to 2 pg/ml to generate a standard curve. The plate was then incubated for 1 hour at room temperature. The dilution buffer was 1× TBS (0.1 M Tris, 0.5 M NaCl) plus 1% BSA. The plate was washed ×3 with wash buffer. Biotinylated mouse anti-human IFNγ (BD Pharmingen, Cat# 554550) was added at 1 μg/ml concentration and the plate was incubated at room temperature for 1 hour. The plate was washed again ×3 with wash buffer. HRP-conjugated Streptavidin (Thermo Fisher, Cat# 21130) was added at a 1:2000 dilution from the stock, with 100 μl added per well. The plate was then incubated at room temperature for 1 hour in the dark. The plate was washed again x3 with wash buffer. 100 μl per well of 1-Step Ultra TMB-ELISA development solution (Thermo Fisher, Cat #34028) was added per well. The plate was read at wavelength 405 nm when color developed sufficiently.

### 2. Analysis of CAR19 T Cell Targeting 293-CD20 Cells by Fusion Proteins Binding CD20

[0446] 293 cells expressing CD20 were used as target cells and were assayed using the same XTT assay described above.

### 3. Analysis of CAR19 T Cell Targeting A431 Cells by Fusion Proteins Binding EGFR

[0447] A431 cells were used as EGFR expressing target cells and were assayed using the same XTT assay described above.

### Results

[0448] Summary results of the IFNy ELISA at 24 hours for construct #42 fusion protein are shown in FIG. 47 (10:1 effector:target ratio) and FIG. 48 (1:1 effector:target ratio). The increase in IFNy concentration in both cases was >2-fold over background. Summary results of the IFNy ELISA at 24 hours for construct #83 are shown in FIG. 69A (10:1 effector:target ratio) and FIG. 69B (2:1 effector:target ratio). Summary results of the IFNγ ELISA at 48 hours for construct #83 fusion protein are shown in FIG. 69C (10:1 effector:target ratio) and FIG. 69D (2:1 effector:target ratio). Summary results of the IFNγ ELISA at 24 hours for construct #33-4 are shown in FIG. 70 (2:1 effector:target ratio)

[0449] FIG. 49 shows summary XTT-cytotoxicity results for the 10:1 effector:target ratio after 48 hours with construct #42 fusion protein and BT474 cells, showing an increase in cytotoxicity >3-fold over background. These results demonstrate that the addition of the fusion protein of construct #42 successfully redirected the targeting activity of the CAR19 T cell to kill a Her2-positive (and CD19-negative) cell. Additional IFNy concentration controls are provided in FIGS. 50 and 51.

[0450] FIG. 71A shows summary XTT-cytotoxicity results for the 10:1 effector:target ratio after 48 hours with construct #83 fusion protein and 293-CD20 cells. FIG. 71B shows summary XTT-cytotoxicity results for the 2:1 effector:target ratio after 48 hours with construct #83 fusion protein and 293-CD20 cells. A negative value indicates active cell growth over the course of the assay. These results demonstrate that the addition of the fusion protein (#83) successfully redirected the targeting activity of the CAR19 T cell to kill a CD20-positive (and CD19-negative) cell via the anti-CD20 scFv-CD19 protein fusion.

[0451] FIG. 72A shows summary XTT-cytotoxicity results for the 10:1 effector:target ratio after 24 hours with fusion protein from constructs #33+#4 and A4321 cells. FIG. 72B shows summary XTT-cytotoxicity results for the 2:1 effector:target ratio after 24 hours with fusion protein from constructs #33+#4 and A4321 cells. These results demonstrate that the addition of the fusion protein (from construct #33+#4, coexpressed) successfully redirected the targeting activity of the CAR19 T cell to kill a EGFR-positive (and CD19-negative) cell via the anti-EGFR-CD19 protein fusion. FIG. 77A shows expression and secretion of construct #42 fusion protein secreted from transfected Jurkat cells stably expressing a CD19 CAR construct (SEQ ID NO. 71: FMC63 CAR-19 construct Flag-tagged-1). Detection of secretion of the fusion protein was performed by ELISA procedures described herein using antibody FMC63 to capture and HRP-confugated anti-HIS antibody to detect. FIG. 77B shows CAR19-mediated cytotoxicity redirected to HER2+cells by CAR19 T cell secretion of fusion protein encoded by construct #42. 1×104 HER2+BT474 cells were plated in each well of a 12 well cell culture plate. The Jurkat-#71 stable line with or without #42 inserted was added to the wells containing BT474 cells at a ratio of 2:1 for cytotoxicity analysis using the XTT assay. The assay was performed after 24 hours of coculture of the T cells with the BT474 cells. Positive controls for the assay were the use of purified fusion protein from construct #42 fusion protein bridging with Jurkat-71, and use of purified fusion protein from construct #42 fusion protein bridging with CAR19 T cells (Promab). Jurkat cells stably transfected with the CAR19 construct #71 and then transiently transfected with construct #42 were able to secrete the encoded #42 fusion protein and mediate redirected killing of HER2+BT474 cells.

### Example 9. Analysis of Constitutive and Inducible Promoters in Jurkat Cells

### Methods

[0452] Jurkat cells were grown in RPMI media containing 10% Fetal Bovine Serum (Gibco) and were transfected using the Invitrogen Neon electroporation system as follows. All steps were done at room temperature. Approximately 1.4×10⁷ cells were centrifuged at 1000 rpm for 3 minutes. The supernatant was removed and the cells washed two times with PBS without calcium or magnesium (Gibco) then centrifuged as above. The cells were resuspended in 1.3 ml of the R Resuspension buffer, provided in the Neon transfection system 100 μl kit (cat. #MPK10096). 100 μl of the cell suspension containing approximately 10⁶ Jurkat cells was used for each electroporation. A maximum volume of 10 μl for each DNA construct (minimum DNA concentration 0.73 μg/μl; maximum DNA concentration 1.48 μg/μl) was added to a 1.5 ml tube prior to distribution of the cells. The mixture was mixed gently and pulled up into a Neon tip. The cells plus DNA mixture were electroporated on the setting 1600 volts, 10 ms and 3 pulses in the Neon electroporation tubes filled with 3 ml of Electrolytic Buffer E2, provided in the Neon transfection system kit. The cells were then put into 2 ml RPMI/10% FBS in a 6 well dish and incubated overnight at 37° C. and 5% CO₂. On day 2, the cells from each well were pipetted up and down and transferred into 2 wells of a 12 well dish (1 ml each). One well remained unstimulated and the other well was stimulated with PMA (50 ng/ml) and Ionomycin (1 μg/ml) for various lengths of time. Expression of the GFP reporter was read in the FL1 channel by a Flow Cytometer (Accuri, BD Biosystems) at 6 hrs, 18 hrs or 48 hrs. The activation state of the cells was determined using anti-human CD69 staining (Browning, J. L et al. 1997. J. Immunol. 159:3288-3298).

[0453] The following constructs were evaluated: CMV promoter-tGFP (SEQ ID NO:266); human CD69 promoter-tGFP (SEQ ID NO:246); human TNFalpha promoter-tGFP (SEQ ID NO:247); and NFAT element ×6 promoter-tGFP (SEQ ID NO:249). Electroporation without DNA was used as a control.

[0454] Flow cytometry was performed using 5×10⁵ cells/test, gated on FL1 to detect tGFP. The anti-CD69-PE conjugated antibody was used at 10 μl/test in 100 μl (BD Biosystems). The PE (phycoerythrin) fluorescent dye-conjugated antibody to CD69 was read in the FL2 channel. The FACS buffer was PBS containing 1% BSA and 0.1% Sodium Azide. After a final wash the cells were fixed in 2% paraformaldehyde.

### Results

[0455] As shown in FIGS. 61B and 61D, the constitutive CMV promoter was modestly impacted by Jurkat cell activation, with approximately 4% more cells present in the tGFP gate at increased MFI. The constitutive activation was sufficient however, as shown in the unactivated samples having 14.7-17.9% cells in the positive gate (see FIGS. 60A and 60C).

[0456] For the inducible promoters, cells were activated using PMA and Ionomycin to mimic canonical T cell activation. Under these activation conditions (“P+I”) the TNF promoter had a marked impact on MFI at 6 hours (see FIGS. 62A-D), and the CD69 promoter has a dramatic impact on both % positive cells and MFI at 48 hours (see FIGS. 61A-61D). These findings were consistent with the known kinetics of TNF and CD69 upregulation following T cell activation, where TNF has rapid but short-lived activation, while CD69 comes up gradually and then remains elevated (Sareneva, T. et al. 1998. Immunology 93: 350-357; Browning, J. L et al. 1997. J. Immunol. 159:3288-3298). Expression of CD69 on the cell surface shows upregulation at 18 hours continuing to 48 hours (see FIGS. 64A-64D), in support of the CD69-tGFP promoter data. NFATx6 had a modest impact at 6 hours only and appeared to be the weakest promoter of those shown here (see FIGS. 63A-D). The results are summarized in the following Table:

| | | | | | | | |
|---|---|---|---|---|---|---|---|
| | | 6 hr | 6 hr | 18 hr | 18 hr | 48 hr | 48 hr |
| Promoter | activation | % pos | MFI | % pos | MFI | % pos | MFI |

constitutive

| | | | | | |
|---|---|---|---|---|---|
| CMV | − | 14.7 | 1.3 | 17.9 | 0.5 |
| CMV | + | 19 | 1.6 | 22 | 1.1 |

inducible

| | | | | | | | |
|---|---|---|---|---|---|---|---|
| TNF | − | 33.8 | 1.5 | 0.1 | 0.02 | | |
| TNF | + | 39.3 | 2.2 | 0.1 | 0.03 | | |
| NFATx6 | − | 4 | 0.2 | 0 | 0.02 | | |
| NFATx6 | + | 5.6 | 0.7 | 0.1 | 0.025 | | |
| CD69 | − | | | 20.5 | 0.6 | 7.6 | 1.3 |
| CD69 | + | | | 24 | 1 | 16.3 | 3.4 |

% Pos refers to the percentage of cells in the R2 (tGFP-positive) gate in the FACS plots; MFI is the mean fluorescence of the cells within the R2 gate (cell number × 10⁶). The no-DNA negative control cell cultures had on average a “% Pos” value of less than 0.5 and an “MFI” of less than 0.03.

### Example 10. Analysis of Heteromeric Fusion Proteins

### Methods

[0457] Co-expression of CD19-D1+D2-hulgGFc (construct #29 described in Example 5) and Trastuzumab scFv (VH/VL)-huIgGFc (amino acid SEQ ID NO:103; nucleotide SEQ ID NO:303; construct #103) were analyzed in 293T cells. 293T cells were transfected using Lipofectamine 2000 with nucleotide sequences encoding construct #29 only or #29 plus #103; supernatants were harvested after 3 days. An ELISA plate was coated with mAb FMC63 for detection of construct #29 homodimers and with HER2-hulgGFc for detection of construct #29 +#103 heterodimers. The supernatants were added to the coated plate and allowed to incubate for 1 hour. After washing, bound protein was detected using an HRP-conjugated anti-hulgG antibody for homodimer of #29. The heterodimer of #29+#103 was detected via the binding of mAb FMC63 followed by HRP-conjugated mouselgG antibody.

[0458] FIG. 78 shows co-transfecting construct #29 (expressing CD19-D1+D2-huIgGFc) together with construct #103 (expressing Trastuzumab scFv (VH/VL)-huIgGFc) results in the formation of homodimers and a heterodimer, where one arm is CD19-D1+D2-huIgGFc and the other arm is Trastuzumab scFv (VH/VL)-huIgGFc. Formation of the heterodimer was detected by capturing the complex using the ligand for Trastuzumab (Her2-Fc) and detecting using the anti-CD19 mAb, FMC63.

### Example 11—Yeast Display of CD19 and Variants

[0459] As discussed in the disclosure, in some embodiments, CD19 can be used as a scaffold to produce CD19 variants that can bind to targets of interest. This Example demonstrates the production of yeast display libraries to screen for such CD19 variants.

### Yeast Display of Wild-Type CD19 Extracellular Domain

[0460] The extracellular domain of human wild-type CD19 (amino acids 1-272) was genetically fused either C-terminal or N-terminal to Aga2p, via a polypeptide linker. The fusion constructs, with C-terminal c-myc epitope tags, were expressed within EBY100 Saccharomyces cerevisiae yeast. CD19 expression per yeast was evaluated by flow cytometry following labeling with fluorescein-conjugated mouse-anti-c-myc epitope antibody (Bethyl). Experiments were performed as described in Chao et al., Isolating and engineering human antibodies using yeast surface display. Nat. Protoc. 1, 755-768 (2006). As shown in FIG. 79, wild-type CD19 extracellular domain was effectively displayed on the yeast surface as a fusion to Aga2p in either Aga2p-linker-CD19 (FIG. 79A) or CD19-linker-Aga2p (FIG. 79B) format.

The Yeast-Displayed CD19 ECD Effectively Binds to Anti-CD19 Monoclonal Antibodies (mAbs)

[0461] The fusion constructs, with C-terminal c-myc epitope tags, were expressed within EBY100 Saccharomyces cerevisiae yeast. CD19 expression per yeast and antibody binding were evaluated by flow cytometry following labeling with fluorescein-conjugated goat-anti-c-myc epitope antibody as well as the indicated mouse monoclonal antibody followed by AlexaFluor647-conjugated anti-mouse antibody. Experiments performed as in Chao et al., Isolating and engineering human antibodies using yeast surface display. Nat. Protoc. 1, 755-768 (2006). As shown in FIG. 80, yeast-displayed CD19 extracellular domain effectively bound to commercially available anti-CD19 mAbs UltramAb103 (Origene) and 3B10 (Novus).

### Generation and Initial Analysis of Combinatorial Ligand Libraries

[0462] The CD19 ECD can be diversified to generate new binding functionality to a variety of molecular targets (see Woldring et al., High-Throughput Ligand Discovery Reveals a Sitewise Gradient of Diversity in Broadly Evolved Hydrophilic Fibronectin Domains. PLoS One 10, e0138956 (2015)). To exemplify this, the solvent-exposed loops in Ig domain 1, or Ig domain 2, or the beta sheet surface in Ig domain 2, were varied. Example diversity designs are indicated in FIG. 81. The homology model was determined as follows. The 258 residue amino acid sequence of CD19 comprised of the N-terminal domain, domain linker, and C-terminal domain was submitted to HHPred3 using the default parameters. HHPpred makemodel was then used to make a model for MODELLER4 using the automatically pick best template option. The optimal single template (1qz1) was selected for MODELLER (Note: the option for selecting the multiple optimal templates also output a structure similar to 1qz1). The output structure was then refined in Foldit5 standalone by side-chain repacking, and full-structure minimization.

[0463] These example libraries were constructed at the genetic level (>1×10⁸ yeast transformants) as described in Woldring et al., High-Throughput Ligand Discovery Reveals a Sitewise Gradient of Diversity in Broadly Evolved Hydrophilic Fibronectin Domains. PLoS One 10, e0138956 (2015). CD19 expression per yeast and antibody binding were evaluated by flow cytometry following labeling with fluorescein-conjugated goat-anti-c-myc epitope antibody as well as the indicated mouse monoclonal antibody followed by AlexaFluor647-conjugated anti-mouse antibody as described in Chao et al., Isolating and engineering human antibodies using yeast surface display. Nat. Protoc. 1, 755-768 (2006). Variants were effectively displayed on the yeast cell surface and maintained binding to mAbs UltramAb103 and 3B10 (FIG. 82), suggesting that the mutated CD19 ECD retained its overall structure.

Ligand Discovery from Combinatorial Libraries can Effectively Yield Novel Binding Molecules.

[0464] The example libraries were sorted for binders to biotinylated epidermal growth factor receptor (EGFR) and biotinylated human epidermal growth factor receptor 2 (HER2) using magnetic bead selections (as described in Woldring et al., High-Throughput Ligand Discovery Reveals a Sitewise Gradient of Diversity in Broadly Evolved Hydrophilic Fibronectin Domains. PLoS One 10, e0138956 (2015); Ackerman et al., Highly avid magnetic bead capture: an efficient selection method for de novo protein engineering utilizing yeast surface display. Biotechnol. Prog. 25, 774-783 (2009); Hackel et al., Stability and CDR Composition Biases Enrich Binder Functionality Landscapes. J. Mol. Biol. 401, 84-96 (2010)). Selective enrichment of binders to EGFR and HER2 were revealed from all three libraries (FIG. 83). FIG. 83A depicts results of resultant ligand populations evaluated for binding to avidin (CtlA and CtlB) or the desired target (EGFR or HER2). Substantial preference for the desired target was observed. FIG. 83B depicts results from analysis of domain 2 sheet library, which was sorted twice for binding to HER2, labeled with 50 nM biotinylated IgG (left panel) or biotinylated HER2 (right panel), followed by streptavidin-AlexaFluor647. Yeast were also labeled with mouse anti-c-myc antibody followed by anti-mouse-AlexaFluor488. Select variants exhibit strong HER2-specific binding (right panel, upper right quadrant).

### Example 12 Anti-Idiotype (Anti-Id) scFv/scFv Fusion Protein

[0465] Construction and Expression of Trastuzumab scFv-Anti-Id Fusion Proteins

[0466] This example illustrates that an anti-idiotype scFv (136.20.1 scFv, which recognizes the scFv domain of the mouse anti-human antibody FMC63 (see, e.g., Jena B, et al. (2013) Chimeric Antigen Receptor (CAR)-Specific Monoclonal Antibody to Detect CD19-Specific T Cells in Clinical Trials. PLoS ONE 8(3): e57838; US 2016/0096902) can be fused to scFvs that bind to HER2, an antigen expressed on solid tumors and their metastases, e.g., the anti-Her2 scFv that is disclosed within SEQ ID NO: 16, SEQ ID NO: 24, SEQ ID NO: 25, SEQ ID NO: 26, SEQ ID NO: 27, SEQ ID NO: 40, SEQ ID NO: 41, SEQ ID NO: 42, SEQ ID NO: 43, SEQ ID NO: 55, SEQ ID NO: 56, SEQ ID NO: 93, SEQ ID NO: 94, SEQ ID NO: 95, SEQ ID NO: 96, SEQ ID NO: 97, SEQ ID NO: 103, or other variations of the anti-Her2 scFv or of other anti-Her2 scFvs whether known in the art or newly discovered.

[0467] Trastuzumab scFv/anti-Id scFv fusion proteins containing 136.20.1 anti-idiotype scFv and trastuzumab scFv is created using the coding sequences for each scFv, with an appropriate signal sequence, linked together using G45 or other robust linker sequences as needed to allow each VH/VL pair to fold, and also to retain the structural integrity of each scFv by preventing interaction between the two scFv, using methods well known in the art.

[0468] The trastuzumab scFv-anti-Id scFv fusion proteins are produced in a variety of configurations, where each scFv is provided in tandem as a VH/VL pair, and in the N- or C-terminal position. For example, trastuzumab scFv-anti-Id scFv fusion proteins include N-terminal 136.20.1 scFv (VH/VL or VL/VH) and C-terminal trastuzumab scFv (VH/VL or VL-VH) and also N-terminal trastuzumab scFv (VH/VL or VL/VH) and C-terminal 136.20.1 scFv (VH/VL or VL/VH).

[0469] A His-tag is used to monitor protein expression. The His-tag is N-terminal or C-terminal in placement. A FLAG-tag is used as needed. A biotin label is used as needed. Other tags and labels are used as needed.

[0470] The assembled sequences are cloned into expression systems for analysis. For example, the sequences are cloned into the pcDNA-1 vector. The cloned sequences are expressed in mammalian cells. For example, 293T cells are transfected using vector DNA and Lipofectamine 2000® (Invitrogen). Some transfections are for temporary protein production (transient) while some are for cell line development (stable). Optimized sequences are cloned into retroviral, lentiviral or mRNA systems suitable for large scale transduction of human T cells. Protein expression level and quality is determined by Western blot analyses, immunoprecipitation, ELISA analyses, chromatography and/or additional methods as needed.

Trastuzumab scFv-Anti-Id Fusion Proteins are Recognized by FMC63 and by HER2

[0471] The ability of the trastuzumab scFv-anti-Id scFv fusion proteins to bind to the distinct ligands is determined using a variety of methods to demonstrate specific binding. ELISA plates are coated with FMC63 antibody or with streptavidin/biotinylated-HER2 to bind to 136.20.1 scFv and trastuzumab scFv, respectively. After binding is allowed to occur, the plates are gently washed to remove unbound materials. Anti-HIS-antibody coupled to horseradish peroxidase (HRP) is used to detect the bound fusion protein. In another iteration, an ELISA plate is coated with anti-HIS antibody to capture the fusion protein, and biotinylated HER2/streptavidin-HRP is used to detect. In another iteration, the ELISA plates is coated with FMC63 antibody and biotinylated HER2/streptavidin-HRP is used to detect. Other iterations are utilized as needed. The ELISAs are used to monitor expression of transient transfections, stable transfections, and cell transductions.

Trastuzumab scFv-Anti-Id Fusion Proteins Bind to HER2 Positive BT474 Cells

[0472] The trastuzumab scFv-anti-Id scFv fusion proteins are shown to bind to target (HER2 positive) tumor cells using standard techniques known in the art, e.g. flow cytometry, ELISA, etc. Trastuzumab scFv-anti-Id scFv fusion proteins are incubated with BT474 cells or other human tumor cells or cell lines that are HER2-positive. After incubation the cells are gently washed to remove unbound materials. The bound trastuzumab scFv-anti-Id scFv fusion proteins are detected using fluorescently labeled anti-HIS antibody or FMC63 antibody.

CAR19 T Cells are Redirected to HER2 Positive Tumor Cells via the Trastuzumab scFv-Anti-Id Fusion Protein, and in a Manner that Successfully Activates the CAR19 T Cells so that they Lyse the Tumor Cells

[0473] Trastuzumab scFv-anti-Id scFv fusion proteins are shown to induce CAR T cell activity using cytokine release and cytotoxicity assays. Trastuzumab scFv-anti-Id scFv fusion proteins are incubated with BT474 cells or other human tumor cells or cell lines that are HER2-positive. Trastuzumab scFv-anti-Id scFv fusion proteins are in the form of a soluble purified protein, or are in a cell culture supernatant, or are secreted from a cell in the culture, for example a CAR T cell that has an FMC63-based CAR domain. FMC63-based CAR T cells are added to the culture if they are not already present. The coculture is allowed to incubate, for example between 4 hours and 72 hours. At an optimal time, supernatants are collected for ELISA analyses, for example, for IL-2 and IFN-gamma. At an optimal time the cells are analyzed using a cytotoxicity assay, for example an XTT assay. The assays demonstrate that trastuzumab scFv-anti-Id scFv fusion proteins redirect FMC63 based CAR T cells to lyse target HER2-positive tumors cells, causing their cytotoxicity.

Construction and Expression of Various scFv-Anti-Id Fusion Proteins

[0474] The scFv from the 136.20.1 anti-idiotype antibody recognizing FMC63 can be fused to many other scFv directed to diverse tumor antigens and investigated for functionality in the same manner as the trastuzumab scFv fusion. In another example, the 136.20.1 scFv is fused to a tumor targeting scFv, for example an scFv that targets CD20, an antigen that is expressed on B cell malignancies, e.g., the anti-CD20 scFv as is disclosed as a component of SEQ ID NO: 65, SEQ ID NO: 78, SEQ ID NO: 79, SEQ ID NO: 80, SEQ ID NO: 81, SEQ ID NO: 82, SEQ ID NO: 83, SEQ ID NO: 84, SEQ ID NO: 85, SEQ ID NO: 125, or SEQ ID NO: 126 or other variations of the anti-CD20 scFv or of other anti-CD20 scFvs whether known in the art or newly discovered. In a further example, the 136.20.1 anti-idiotype scFv is fused to an scFv that targets BCMA, an antigen that is expressed on plasma cell malignancies including multiple myeloma, e.g. the anti-BCMA scFv as is disclosed as a component of SEQ ID NO: 89, SEQ ID NO: 90, SEQ ID NO: 91, SEQ ID NO: 92, SEQ ID NO: 119, or SEQ ID NO: 120 or other variations of this anti-BCMA scFv or of other anti-BCMA scFvs whether known in the art or newly discovered. In another example, the 136.20.1 anti-idiotype scFv is fused to a tumor targeting scFv, for example, an scFv that targets EGFR, an antigen expressed on solid tumors and their metastases, e.g., the anti-EGFR scFv that is disclosed within SEQ ID NO: 21, SEQ ID NO: 22, SEQ ID NO: 54, SEQ ID NO: 57, SEQ ID NO: 58, SEQ ID NO: 88, SEQ ID NO: 94, SEQ ID NO: 95, SEQ ID NO: 96, SEQ ID NO: 97, or other variations of the anti-EGFR scFv or of other anti-EGFR scFvs whether known in the art or newly discovered.

### Example 13 Construction and Expression of Trastuzumab scFv Fused to an Anti-Id to an scFv to CD22

[0475] In further exemplification, the anti-idiotype single-chain Fv (scFv) antibody specific for the murine (RFB4), chimeric (SM03) and/or humanized (SM06) versions of an anti-CD22 antibody is used. The fusion protein is constructed using similar methods as described in Example 12.

### Example 14 Bispecific Antibodies Including Anti-Id

[0476] Diverse formats of bispecific antibodies are known in the art (see, e.g., Kontermann et al., Drug Disc. Today 20:838-847 (2015); Spiess et al., Mol. Immunol. 67:95-106 (2015)), and can be used in a construct described herein that contains an anti-idiotypic antibody or antibody domain, e.g., an scFv. Exemplary bispecific antibodies include, e.g., triomab, knobs into holes (kih) IgG, crossMab, ortho-Fab IgG, dual variable domain immunoglobulins (DVD-Ig), 2 in 1-IgG, IgG-scFv, tandem scFv, scFv₂-Fc, bi-nanobody, BiTE, tandAbs, DART, DART-Fc, scFv-HAS-scFv, dock-and-lock (DNL)-Fab3, ImmTAC, DAF, HAS body, IgG-fynomer, and ART-Ig. Additional examples include XmAb5574, XmAb5871, XmAb7195, Xtend-TNF, XmAb14045, XmAb13676, XmAb13551 (Xencor). In some embodiments, a bispecific construct is monovalent, where the VH/VL arm binds a tumor antigen (e.g., a TSA or TAA described herein), and the other arm is an anti-idiotype specific scFv (e.g., derived from 136.20.1). In some embodiments, such a construct can be bivalent, in which the individual VH/VL domains (e.g. as constitute a Fab or an scFv) are bispecific, in which one VH/VL pair binds one target (e.g., a TSA or TAA described herein) and the other VH/VL pair consists of an anti-idiotype antibody domain. In one example, the TSA-targeting antibody domains specifically recognize Her2 and EGFR. In one example, the TSA-targeting antibody domains specifically recognize CD19 and CD20. In one example the TSA-targeting antibody domains specifically recognize CD123 and ROR1. In another embodiment, the construct includes an anti-idiotypic domain (e.g., an anti-idiotype scFv) fused to two or more antibody domains (e.g., scFvs) that target tumor antigens (e.g., TAA and/or TSA). In another embodiment, the construct includes an anti-idiotypic domain (e.g., an anti-idiotype scFv) fused to two or more antibody domains (e.g., scFvs) one of which targets a tumor antigen (e.g., TAA or TSA) and the other of which targets a functional moiety (e.g., CTLA4, PD-1, PD-L1, PD-L2, TIM3, A2AR, LAG3, CD39, CD73, IDO, a TNF receptor superfamily protein, an innate pathway protein or receptor, an NK cell protein or receptor, a stromal cell protein or receptor, a myeloid cell protein or receptor, a tumor cell protein or receptor, a glycoprotein, or another moiety that is relevant to the biology of anti-tumor responses). In one example, one antibody domain specifically recognizes ROR1 and the other antibody domain specifically recognizes PD-L1. In one example, one antibody domain specifically recognizes BCMA and the other antibody domain specifically recognizes PD-L1. In one example, one antibody domain specifically recognizes ROR1 and the other antibody domain specifically recognizes CTLA4. In one example, one antibody domain specifically recognizes Her2 and the other antibody domain specifically recognizes PD-L1.

[0477] In one example, a full length anti-idiotype antibody is used in a bispecific construct with the second antibody domain being added (e.g., to the N-terminus or the C-terminus). In another example, an anti-idiotype antibody domain used is a Fab fragment, Fab′ fragment, F(ab′)₂ fragment, scFv fragment, Fv fragment, dsFv diabody, dAb fragment, Fd′ fragment, Fd fragment, CDR region, a cameloid antibody, a masked antibody (e.g., Probody®), a single chain or Tandem diabody (TandAb®), a VHH, an Anticalin®, a single-domain antibody (e.g., Nanobody®), an ankyrin repeat protein or DARPIN®, an Avimer®, an Adnectin®, an Affilin®, an Affibody®, a Fynomer®, or a Centyrin® or a Type III fibronectin domain derivative.

[0478] In one embodiment, a bispecific construct containing the anti-idiotypic antibody sequences is a purified soluble protein. In another embodiment, a bispecific construct is encoded in a lentiviral vector under a constitutively active promoter. In another embodiment, a bispecific construct is encoded in a lentiviral vector under a promoter whose activity is induced by engagement of the CAR domain and cellular activation.

### Example 15 Masked scFv's Fused to scFv's Anti-Idiotypic to a CAR

[0479] Construction and Expression of an scFv to EGFR

[0480] An scFv from the anti-EGFR mAb Cetuximab, also called C225, designated M1503, is made essentially as described in Kim et al., PLoS ONE 9(12): e113442. doi:10.1371/journal.pone.0113442 (2014) , with a Histidine tag (His tag) added at the C-terminus. This scFv has the orientation VL/VH, leaving the VL N-terminus unblocked. The scFv is expressed in HEK293 cells under a CMV promoter as described herein, and supernatants assayed for binding to EGFR by a ‘sandwich’ ELISA. Two orientations are evaluated: an anti-HIS antibody on the plate, with biotinylated EGFR for detection; and the reverse, with EGFR immobilized on the plate, and detection with anti-HIS antibody.

Construction and Expression of a Masked scFv to EGFR, and Demonstration of Proteolytic Activation

[0481] Numerous ‘masks’ for mAb C225 to EGFR are known (described in, e.g., U.S. Pat. No. 8,513,390). Examples of C225 masks are attached to the N-terminus of the C225 scFv, and each expressed in HEK293 cells as described. A HIS tag at the C-terminus is retained in each case for detection.

[0482] The masked C225 shows reduced binding to EGFR in one or both sandwich ELISA formats, demonstrating the efficacy of the mask in blocking binding of the scFv to its target. However, when treated with Matriptase or other appropriate proteases (e.g., described in U.S. Pat. No. 8,513,390), the mask is released and the scFv “activated”, as measured by binding to EGFR in the ELISA format.

Construction of a Masked EGFR scFv—Anti-Id scFv Fusion Protein, and Demonstration of Binding After Proteolytic Activation

[0483] An anti-idiotype scFv to FMC63 (as described in Example 12) is fused C-terminal to the masked anti-EGFR scFv using a standard (G4S)4 linker. A HIS tag is placed at the C-terminus, i.e., at the C-terminus of the anti-Id scFv. Constructs are made that include different lengths and variations of linkers. The molecule is secreted from HEK293 cells as described herein. The secretion of the intact fusion protein is verified by a sandwich ELISA, as described above, for HIS expression and FMC63 binding. Little binding to EGFR is detected using biotinylated EGFR for detection. However, when treated with Matriptase or other appropriate proteases (e.g., described in U.S. Pat. No. 8,513,390), the mask is released and the scFv “activated”, as measured by binding to EGFR in the ELISA format, in parallel with FMC63 binding, showing that upon activation, both halves of the fusion protein are functional.

### Example 16 Masked scFv's Linked to scFv's Anti-Idiotypic to a CAR via an Fc Fusion Protein

[0484] Construction and Expression of a Masked scFv-Fc Fusion Protein, and Demonstration of its Binding to its Target Following Proteolytic Activation

[0485] The placement of a masked scFv fused to an Fc from a mAb heavy chain has been described in detail (e.g., U.S. Pat. No. 8,513,390), resulting in a ‘mini-antibody’ format in which the masked scFv-Fc fusion protein is secreted in a bispecific format [see FIG. 84]. A masked C225 scFv-Fc fusion is constructed using the linkers and sequences as described for the ‘minibody format’ (i.e., with CH3 domains only) in Kim et al., PLoS ONE 9(12): e113442. doi:10.1371/journal.pone.0113442 (2014), except that the full Fc domain (CH3—CH2) is used, as described herein.

[0486] The construct is expressed in HEK293 cells as described herein, and supernatants evaluated by Sandwich ELISA. Secreted masked scFv-Fc is found in the supernatants, and measured by binding of anti-Ig antibodies, but little or no binding to EGFR is detected. However, when treated with Matriptase or other appropriate proteases (e.g., described in U.S. Pat. No. 8,513,390), the mask is released and the scFv “activated”, as measured by binding to EGFR in the ELISA format, in parallel with binding to anti-Ig, showing that upon activation, both halves of the fusion protein are functional.

Construction and Expression of an Anti-Idiotypic scFv-Fc Fusion Protein, and Demonstration of its Binding to mAb FMC63

[0487] An anti-idiotype scFv to FMC63 is fused to a heavy chain Fc domain as described herein. The construct is expressed in HEK293 cells as described herein, and supernatants evaluated by Sandwich ELISA. Secreted anti-Id scFv-Fc is found in the supernatants, as measured by binding of anti-Ig antibodies and of FMC63, showing that the fusion protein is full length and the scFv functional.

Construction and Expression of a Heterodimeic Fc Fusion Protein Containing a Masked scFv to EGFR on One Arm, and an scFv Anti-Idiotypic for FMC63 on the Other Arm, and Demonstration of Proteolytic Activation of the Masked scFv.

[0488] Example 10 describes construction and expression of a Her2-directed scFv-Fc fusion protein, and a CD19-Fc fusion protein, which were shown to be coexpressed in HEK293 cells as heterodimers. These heterodimers express CD19 on one arm, and the scFv to Her2 on the other, and are functional, as assessed by sandwich ELISA for CD19 (using FMC63 detection) and Her2 scFv (using Her2 detection).

[0489] Similarly, masked scFv-Fc fusion protein and the anti-Id scFv-Fc fusion protein are co-expressed in HEK293 cells. To detect heterodimers, a sandwich ELISA is performed, using FMC63 to detect the anti-Id scFv, and EGFR to detect the anti-EGFR scFv. The anti-Id scFv binds FMC63 (as does the homodimer), but little EGFR binding is observed. However, when treated with Matriptase or other appropriate proteases (e.g., described in U.S. Pat. No. 8,513,390), the mask is released and the scFv “activated”, as measured by binding to EGFR in the ELISA format, in parallel with binding to FMC63, showing that the heterodimer is indeed formed, and that upon activation, both halves of the fusion protein are functional.

### Example 17 Expression and Functional Testing of Anti-FMC63 Anti-Id scFv

[0490] The following table lists the various fusion proteins assayed in this and subsequent Example:

| | | Amino Acid | Nucleotide |
|---|---|---|---|
| Construct # | Description | SEQ ID NO: | SEQ ID NO: |
| 140 | FMC63 CAR-Flag | 113 | 313 |
| 150 | FMC63 CAR | 114 | 314 |
| 151 | anti-CD19 FMC63 | 115 | 315 |
| | CAR heavy chain | | |
| 152 | anti-CD19 FMC63 | 116 | 316 |
| | CAR light chain | | |
| 171 | anti-FMC63 (anti-Id) | 117 | 317 |
| | scFv VH-VL- | | |
| | Trastuzumab scFv- | | |
| | His | | |
| 172 | anti-FMC63 (anti-Id) | 118 | 318 |
| | scFv VL-VH- | | |
| | Trastuzumab scFv- | | |
| | His | | |

### Cloning and Expression of the Anti-FMC63 Antibody

[0491] The amino sequence for the variable heavy and light chains for the anti-FMC63 antibody, 136.20.1, was obtained from Cooper et al. patent WO2014190273 A1. The sequences were back translated and used to generate the full antibody chains. For the heavy chain, the sequence of the leader and constant domains were obtained from a murine IgG2a antibody (UniProt P01863). For the kappa light chain, the signal sequence and constant domains were obtained from Uniprot P01863. The nucleotide sequence of the anti-CD19 FMC63 CAR heavy chain (SEQ ID NO: 315; construct #151) and light chain (SEQ ID NO: 316; construct #152) were chemically synthesized by GenScript and cloned into the vector pcDNA3.1(+) (#151) or pcDNA3.1(+)hygro (#152). Equal amounts of the plasmids were co-transfected into 293T cells using lipofectamine 2000 (Invitrogen/Thermo Fisher Prod#11668019) following the manufacturers instructions; supernatants were harvested after 48hr. For the large-scale transfections, 293T cells were seeded into T175 flasks and transfected with lipofectamine 2000, as above, when the cells reached about 80% confluency. Cells were cultured in bovine FBS with low serum IgG (VWR). Supernatants were harvested every 3-4 days.

### ELISA Method

[0492] A 96 well plate (Pierce, Cat# 15041) was coated with 1.0 ug/ml goat anti-mIgG in 0.1 M carbonate, pH 9.5 for 0/N at 4C. The plate was blocked with 0.3% non-fat milk in Tris buffered saline (TBS 0.1 M Tris, 0.5 M NaCl) (200 ul/well) for 1 hr at RT. Then washed 3× with wash buffer (1× TBST: 0.1 M Tris, 0.5 M NaCl, 0.05% Tween20). The cell culture sup was titrated from 50× dilution down with 3× dilutions,100 ul was added per well and incubated for 1 h at RT. Dilution buffer is 1% BSA in 1× TBS. The plate was washed 3× with wash buffer then 100 ul per well HRP-goat anti-mIgG at 1:2000 was applied and incubated at RT in dark for 1 hr. Then 100 ul of 1-Step Ultra TMB-ELISA from Thermo Fisher, Prod#34028 was added per well and the plate was read at 405 nm when color developed.

### CAR Expression

[0493] 293T cells were transfected with an anti-CD19 FMC63 CAR vector (SEQ ID NO: 313; construct #140). The CAR sequence (FMC63 VL-VH-Flag-CD28 linker/transmembrane/intracellular domain (ICD)-4-1BB ICD-CD3z ICD) was synthesized by ProMab Biotechnologies. The CAR insert was then cloned into a modified form of the System Biosciences vector pCDH-EF1a to generate construct #140 (SEQ ID NO: 313). The vector were transiently transfected into 293T cells using 2.5 ug of DNA and 10 ul of lipofectamine 2000 (Invitrogen/Thermo Fisher). After ˜48 hrs, the cells were harvested and resuspended in FACS buffer (1% BSA, 0.1% sodium azide in PBS). CAR transfected cells (2.5×10^5) were incubated with anti-Flag (1 ug/test) for 30 min at 4° C., spun and washed twice with FACS buffer, then followed by incubation with anti-rabbit IgG-APC for 30 min at 4° C. Cells were spun and washed as above, then fixed with 1% PFA in PBS. Fixed cells were analyzed on Accuri 6 for CAR expression (Flag positive).

### Cell Binding

[0494] Cells transfected with construct #140 (SEQ ID NO: 313) (2.5×10^5 in 50 ul) were incubated with 50 ul sup or purified (5 ug/ml as final conc.) protein of constructs#151/#152 (SEQ ID NO: 315/ SEQ ID NO: 316) for 30 min at 4° C., spun and washed twice with FACS buffer. This was followed by another incubation with anti-mouse Fc gamma-PE for 30 min at 4° C. Cells were spun and washed as above, and fixed with 1% PFA in PBS. Fixed cells were analyzed on Accuri 6 for CAR expression binding (PE positive).

[0495] FIG. 85 confirms the secretion of anti-FMC63 antibody by detection of the presence of anti-FMC63 heavy and light chain in supernatnats of transfected 293T cells. Further, the secreted anti-FMC63 antibody binds CAR19 containing an FMC63 domain. FIG. 86A and demonstrates that the CD19 CAR construct is expressed on the surface of transfected 293T cells (#140). FIG. 86B demonstrates binding of the anti-FMC63 anti-Id scFv to the CD19 CAR construst.

### Example 18 Expression and Functional Testing of Trastuzumab scFv-Anti-Id scFv Fusion Proteins

### Cloning and Expression of Constructs #171 and #172 (SEQ ID NO: 317 and SEQ ID NO: 318, Respectively)

[0496] Constructs were generated to express the anti-FMC63 scFv- Trastuzumab scFv fusion proteins with two orientations of the heavy and light variable domains of anti-FMC63. Construct #171 (SEQ ID NO: 117) contains anti-FMC63 VH-linker-VL-linker-Trastuzumab scFv-His and construct #172 (SEQ ID NO: 118) contains the anti-FMC63 in the VL-linker-VH arrangement. The sequences were chemically synthesized by GenScript and cloned into pcDNA3.1(+) hygro. Supernatants containing the bispecific scFvs were produced by transfecting 293T cells using lipofectamine 2000 (Invitrogen/Thermo Fisher). The supernatants were harvested after 72 hrs by spinning for 3 min at 12k rpm at 4C.

### ELISA Method

[0497] A 96 well plate (Pierce, Cat# 15041) was coated with 1.0 ug/ml Her2-hFc (plate#1) (Acrobiosystems, Cat#HE2-H5253) or FMC63 (plate#2) (NOVUS, Cat#NBP2-527160) in 0.1 M carbonate, pH 9.5 for O/N at 4C. The plates were blocked with 0.3% non-fat milk in TBS (200 ul/well) for 1 hr at RT. The plate was washed 3x with wash buffer (1× TBST: 0.1 M Tris, 0.5 M NaCl, 0.05% Tween20). The cell culture sup was titrated from no dilution down with 3 fold dilutions; the purified construct #42 protein (LakePharma) was started with 1 ug/ml down with 3 fold dilutions. Next, 100 ul was added per well and incubated for 1 h at RT. Dilution buffer is 1% BSA in 1× TBS (0.1 M Tris, 0.5 M NaCl). The plates were washed 3× with wash buffer. For the plate#1, 100 ul of 1 ug/ml FMC63 was added to each well for 1 hr at RT and followed by 100 ul HRP-anti-mlgG at 1:2000. For plate#2, 100 ul HRP-anti-his at 1:2000 was applied per well and incubated for 1 hr at RT. For the final step, 100 ul 1-Step Ultra TMB-ELISA from Thermo Fisher, Prod#34028 was added per well and plates were read at 405 nm when color developed.

### Detection of Binding to Her2-Positive Target Cells

[0498] Supernatant (100 ul) from 293T cells, transfected with constructs #171 or #172, was incubated with 50 ul (2×10e5) SKOV-3 luciferase cells (Cell Biolabs, Inc. #AKR232) on ice for 30 min. The samples were spun, washed 2× with FACS buffer (1% BSA, 0.1% sodium azide in PBS) and then incubated with anti-His tag-PE (5 ul/sample, R&D systems #IC050P) on ice for 30 min. The cells were spun, washed 2× with FACS buffer and fixed with 1% PFA in PBS. Fixed cells were analyzed on Accuri 6 for anti-id-Trastuzumab scFv-His binding. The presence of Her2 on the SKOV-3 cells was determined by staining 2×10e5 cells with 1 ul/sample anti-Her2 (Novus #NBP2-33064PE) for 30 min on ice, spun, washed 2× with FACS buffer, fixed and read as above. An anti-murine IgG2a-PE antibody 1 ul/test (Thermo Fisher #SA1-120-82) was used as a control.

[0499] FIGS. 87A-C further demonstrate Trastuzumab scFv/anti-Id scFv fusion proteins containing 136.20.1 anti-idiotype scFv and trastuzumab scFv secreted from transfected 293T cells bind both FMC63 (FIG. 87A) and Her2 (FIG. 87B). Additionally, Trastuzumab scFv/anti-Id scFv fusion proteins, constructs #171 and #172, are capable of recognizing Her2 expressed on SKOV3 cells. FIG. 87C demonstrates binding of a CD19 expressing construct (#42) with the FMC63 coated plate as a control.

[0500] FIG. 88A demonstrates Her2 expression on SKOV3 cells and FIG. 88B demonstrates binding to the SKOV3-Her2 cells by the Trastuzumab scFv/anti-Id scFv fusion protein.

### Example 19 CAR19 T Cell Targeting and Activation by Trastuzumab scFv-anti-Id scFv Fusion Proteins

### SKOV3-Her2-Luc Killing Assay

[0501] Supernatant from cells transfected with #171 (concentration=0.15 ug/ml), starting at 0.075 ug/ml was titrated down in 3× serial dilution in RPMI+10%FBS (no antibiotics) medium for 8 points. Five replicates were done per dilution. SKOV3-Her2-Luc cells were seeded at 1×10e4/100 ul RPMI+10% FBS (no antibiotics)/well in a solid white plate. The cells were allowed to settle for ˜2 hrs and then spun out and the supernatant removed. Next 50 ul of the 3× serial diluted #171 containing supernatant was added to SKOV3 cells. Then, 50 ul of CAR T cells #150 (SEQ ID NO:314) (5×10e4) was added (5 CART: 1 SKOV3 ratio) and the plate was incubated at 37° C. for 48 hr. The sup was collected and the cells washed 2× with PBS. 20 ul lysis buffer from Luciferase assay system kit, Promega, Fisher CAT# PR-E1500 was added into plate. The plate was placed into the luminometer with injector (Glomax Multi Detection System form Promega). The injector adds 100 ul of Luciferase assay reagent per well, then the well is read immediately. The plate is advanced to the next well for a repeat of the inject-then-read process. The % killing was determined for each concentration by dividing it by the RLU (relative luciferase units) of the target cells only using the equation 1-RLU sample/RLU target cell×100%.

### IFN Gamma ELISA Method

[0502] A 96 well plate (Pierce, Cat# 15041) was coated with 2.0 ug/ml anti-INFg NIB42 (BD Pharmingen, cat#551221 through Fisher) at 100 ul in 0.1 M carbonate, pH9.5 for O/N at 4C. The plate was then blocked with 0.3% NF milk in TBS (200 ul/well) for 1 hr at RT and wash 3× with wash buffer 200 ul/well (1× TBST: 0.1 M Tris, 0.5 M NaCl, 0.05% Tween20). Next, 100 ul cell culture sup were transferred on the plate from the killing assay post 24 h and 48 h on to the plate and incubated for 1 h at RT. The interferon gamma (INFg) standard (recombinant human interferon gamma from Thermo Fisher, cat#RIFNG100) was prepared at starting concentration at 0.1 ug/ml and 3× series dilution to 1pg/ml and then 100 ul was added per well and incubated for 1 h at RT. The dilution buffer is 1% BSA in 1× TBS (0.1 M Tris, 0.5 M NaCl). The plate was then washed 3× with wash buffer and biotinylated-mouse anti-human INFg (BD Pharmingen, cat# 554550 through Fisher) was added at 1 ug/ml concentration at RT for 1 hour. The plate was washed 3× with wash buffer and HRP-conjugated SA (Pierce high sensitivity Streptavidin-HRP: Thermo Fisher, Cat# 21130) was added at 1:2000; it was applied at 100 ul per well and incubated at RT in the dark for 1 hr. The plate was washed again 3× with wash buffer and 100 ul 1-Step Ultra TMB-ELISA from Thermo Fisher, Prod#34028 was added per well. The plate was read at 405 nm when the color developed.

[0503] The results of the luciferase release killing assay are shown in FIG. 89. The results demonstrate that Trastuzumab scFv/anti-Id scFv fusion proteins successfully redirected the targeting activity of the CAR19 T cell to kill a Her2-positive (and CD19-negative) cell in a fusion protein dose dependent manner. FIGS. 90A and 90B demonstrate the calculated cytotoxicity and EC50, respectively, of the CAR19 T cell killing as redirected by the Trastuzumab scFv/anti-Id scFv fusion proteins. A summary of the IFNg ELISA results is shown in FIG. 91.

[0504] The specificity of redirected killing by Trastuzumab scFv/anti-Id scFv fusion proteins is further demonstrated by comparison to control protiens lacking an anti-Id scFv portion. FIGS. 92A and 92B demonstrate that incubation of CAR19 T cells with a a Her2-positive (and CD19-negative) cell and an anti-Her2 protein (construct #16) using assays as described above does not result in killing whereas a Trastuzumab scFv/anti-Id scFv fusion protein does redirect killing of the Her2 positive cell by a CAR19 T cell. Further, FIG. 93 demonstrates that when the target cell (H929) lacks Her2 no redirected killing by the CAR19 T cell occurs.

### Equivalents

[0505] Those skilled in the art will recognize, or be able to ascertain using no more than routine experimentation, many equivalents to the specific embodiments of the invention described herein. The scope of the present invention is not intended to be limited to the above Description, but rather is as set forth in the following claims:

Listing of Amino Acid Sequences
SEQ ID NO. 1
MEFGLSWVFLVALFRGVQCQVQLQESGPGLVKPSETLSLTCTVSGGSVSSGDYYWTWIRQ
SPGKGLEWIGHIYYSGNTNYNPSLKSRLTISIDTSKTQFSLKLSSVTAADTAIYYCVRDR
VTGAFDIWGQGTMVTVSSASTKGPSVFPLAPCSRSTSESTAALGCLVKDYFPEPVTVSWN
SGALTSGVHTFPAVLQSSGLYSLSSVVTVPSSNFGTQTYTCNVDHKPSNTKVDKTVERKC
CVECPPCPAPPVAGPSVFLFPPKPKDTLMISRTPEVTCVVVDVSHEDPEVQFNWYVDGVE
VHNAKTKPREEQFQSTFRVVSVLTVVHQDWLNGKEYKCKVSNKGLPAPIEKTISKTKGQP
REPQVYTLPPSREEMTKNQVSLTCLVKGFYPSDIAVEWESNGQPENNYKTTPPMLDSDGS
FFLYSKLTVDKSRWQQGNVFSCSVMHEALHNHYTQKSLSLSPG
SEQ ID NO. 2
MPPPRLLFFLLFLTPMEVRPEEPLVVKVEEGDNAVLQCLKGTSDGPTQQLTWSRESPLKP
FLKLSLGLPGLGIHMRPLAIWLFIFNVSQQMGGFYLCQPGPPSEKAWQPGWTVNVEGSGG
GGSGGGGSGGGGSDIQMTQSPSSLSASVGDRVTITCQASQDISNYLNWYQQKPGKAPKLL
IYDASNLETGVPSRFSGSGSGTDFTFTISSLQPEDIATYFCQHFDHLPLAFGGGTKVEIK
RTVAAPSVFIFPPSDEQLKSGTASVVCLLNNFYPREAKVQWKVDNALQSGNSQESVTEQD
SKDSTYSLSSTLTLSKADYEKHKVYACEVTHQGLSSPVTKSFNRGEC
SEQ ID NO. 3
MPPPRLLFFLLFLTPMEVRPEEPLVVKVEEGDNAVLQCLKGTSDGPTQQLTWSRESPLKP
FLKLSLGLPGLGIHMRPLAIWLFIFNVSQQMGGFYLCQPGPPSEKAWQPGWTVNVEGSGG
GGSGGGGSGGGGSQVQLQESGPGLVKPSETLSLTCTVSGGSVSSGDYYWTWIRQSPGKGL
EWIGHIYYSGNTNYNPSLKSRLTISIDTSKTQFSLKLSSVTAADTAIYYCVRDRVTGAFD
IWGQGTMVTVSSASTKGPSVFPLAPCSRSTSESTAALGCLVKDYFPEPVTVSWNSGALTS
GVHTFPAVLQSSGLYSLSSVVTVPSSNFGTQTYTCNVDHKPSNTKVDKTVERKCCVECPP
CPAPPVAGPSVFLFPPKPKDTLMISRTPEVTCVVVDVSHEDPEVQFNWYVDGVEVHNAKT
KPREEQFQSTFRVVSVLTVVHQDWLNGKEYKCKVSNKGLPAPIEKTISKTKGQPREPQVY
TLPPSREEMTKNQVSLTCLVKGFYPSDIAVEWESNGQPENNYKTTPPMLDSDGSFFLYSK
LTVDKSRWQQGNVFSCSVMHEALHNHYTQKSLSLSPG
SEQ ID NO. 4
METDTLLLWVLLLWVPGSTGDIQMTQSPSSLSASVGDRVTITCQASQDISNYLNWYQQKP
GKAPKLLIYDASNLETGVPSRFSGSGSGTDFTFTISSLQPEDIATYFCQHFDHLPLAFGG
GTKVEIKRTVAAPSVFIFPPSDEQLKSGTASVVCLLNNFYPREAKVQWKVDNALQSGNSQ
ESVTEQDSKDSTYSLSSTLTLSKADYEKHKVYACEVTHQGLSSPVTKSFNRGEC
SEQ ID NO. 5
METDTLLLWVLLLWVPGSTGDIQMTQSPSSLSASVGDRVTITCQASQDISNYLNWYQQKP
GKAPKLLIYDASNLETGVPSRFSGSGSGTDFTFTISSLQPEDIATYFCQHFDHLPLAFGG
GTKVEIKRTVAAPSVFIFPPSDEQLKSGTASVVCLLNNFYPREAKVQWKVDNALQSGNSQ
ESVTEQDSKDSTYSLSSTLTLSKADYEKHKVYACEVTHQGLSSPVTKSFNRGECDKTHTS
PPSPAPEAAGGPSEVRPEEPLVVKVEEGDNAVLQCLKGTSDGPTQQLTWSRESPLKPFLK
LSLGLPGLGIHMRPLAIWLFIFNVSQQMGGFYLCQPGPPSEKAWQPGWTVNVEGSG
SEQ ID NO. 6
MEFGLSWVFLVALFRGVQCQVQLQESGPGLVKPSETLSLTCTVSGGSVSSGDYYWTWIRQ
SPGKGLEWIGHIYYSGNTNYNPSLKSRLTISIDTSKTQFSLKLSSVTAADTAIYYCVRDR
VTGAFDIWGQGTMVTVSSASTKGPSVFPLAPCSRSTSESTAALGCLVKDYFPEPVTVSWN
SGALTSGVHTFPAVLQSSGLYSLSSVVTVPSSNFGTQTYTCNVDHKPSNTKVDKTVERKC
CVECPPCPAPPVAGPSVFLFPPKPKDTLMISRTPEVTCVVVDVSHEDPEVQFNWYVDGVE
VHNAKTKPREEQFQSTFRVVSVLTVVHQDWLNGKEYKCKVSNKGLPAPIEKTISKTKGQP
REPQVYTLPPSREEMTKNQVSLTCLVKGFYPSDIAVEWESNGQPENNYKTTPPMLDSDGS
FFLYSKLTVDKSRWQQGNVFSCSVMHEALHNHYTQKSLSLSPGGGGGSGGGGSGGGGSEV
RPEEPLVVKVEEGDNAVLQCLKGTSDGPTQQLTWSRESPLKPFLKLSLGLPGLGIHMRPL
AIWLFIFNVSQQMGGFYLCQPGPPSEKAWQPGWTVNVEGSG
SEQ ID NO. 7
MEFGLSWVFLVALFRGVQCQVQLVQSGAEVKKPGASVKVSCKASGYTFTDYYMHWVRQAP
GQGLEWMGRVNPNRRGTTYNQKFEGRVTMTTDTSTSTAYMELRSLRSDDTAVYYCARANW
LDYWGQGTTVTVSSASTKGPSVFPLAPCSRSTSESTAALGCLVKDYFPEPVTVSWNSGAL
TSGVHTFPAVLQSSGLYSLSSVVTVPSSSLGTKTYTCNVDHKPSNTKVDKRVESKYGPPC
PPCPAPEAAGGPSVFLFPPKPKDTLMISRTPEVTCVVVDVSQEDPEVQFNWYVDGVEVHN
AKTKPREEQFNSTYRVVSVLTVLHQDWLNGKEYKCKVSNKGLPSSIEKTISKAKGQPREP
QVYTLPPSQEEMTKNQVSLTCLVKGFYPSDIAVEWESNGQPENNYKTTPPVLDSDGSFFL
YSRLTVDKSRWQEGNVFSCSVMHEALHNHYTQKSLSLSLG
SEQ ID NO. 8
MPPPRLLFFLLFLTPMEVRPEEPLVVKVEEGDNAVLQCLKGTSDGPTQQLTWSRESPLKP
FLKLSLGLPGLGIHMRPLAIWLFIFNVSQQMGGFYLCQPGPPSEKAWQPGWTVNVEGSGG
GGSGGGGSGGGGSDIQMTQSPSSLSASVGDRVTITCSVSSSVSSIYLHWYQQKPGKAPKL
LIYSTSNLASGVPSRFSGSGSGTDFTLTISSLQPEDFATYYCQVYSGYPLTFGGGTKVEI
KRTVAAPSVFIFPPSDEQLKSGTASVVCLLNNFYPREAKVQWKVDNALQSGNSQESVTEQ
DSKDSTYSLSSTLTLSKADYEKHKVYACEVTHQGLSSPVTKSFNRGEC
SEQ ID NO. 9
MPPPRLLFFLLFLTPMEVRPEEPLVVKVEEGDNAVLQCLKGTSDGPTQQLTWSRESPLKP
FLKLSLGLPGLGIHMRPLAIWLFIFNVSQQMGGFYLCQPGPPSEKAWQPGWTVNVEGSGG
GGSGGGGSGGGGSQVQLVQSGAEVKKPGASVKVSCKASGYTFTDYYMHWVRQAPGQGLEW
MGRVNPNRRGTTYNQKFEGRVTMTTDTSTSTAYMELRSLRSDDTAVYYCARANWLDYWGQ
GTTVTVSSASTKGPSVFPLAPCSRSTSESTAALGCLVKDYFPEPVTVSWNSGALTSGVHT
FPAVLQSSGLYSLSSVVTVPSSSLGTKTYTCNVDHKPSNTKVDKRVESKYGPPCPPCPAP
EAAGGPSVFLFPPKPKDTLMISRTPEVTCVVVDVSQEDPEVQFNWYVDGVEVHNAKTKPR
EEQFNSTYRVVSVLTVLHQDWLNGKEYKCKVSNKGLPSSIEKTISKAKGQPREPQVYTLP
PSQEEMTKNQVSLTCLVKGFYPSDIAVEWESNGQPENNYKTTPPVLDSDGSFFLYSRLTV
DKSRWQEGNVFSCSVMHEALHNHYTQKSLSLSL
SEQ ID NO. 10
METDTLLLWVLLLWVPGSTGDIQMTQSPSSLSASVGDRVTITCSVSSSVSSIYLHWYQQK
PGKAPKLLIYSTSNLASGVPSRFSGSGSGTDFTLTISSLQPEDFATYYCQVYSGYPLTFG
GGTKVEIKRTVAAPSVFIFPPSDEQLKSGTASVVCLLNNFYPREAKVQWKVDNALQSGNS
QESVTEQDSKDSTYSLSSTLTLSKADYEKHKVYACEVTHQGLSSPVTKSFNRGEC
SEQ ID NO. 11
METDTLLLWVLLLWVPGSTGDIQMTQSPSSLSASVGDRVTITCSVSSSVSSIYLHWYQQK
PGKAPKLLIYSTSNLASGVPSRFSGSGSGTDFTLTISSLQPEDFATYYCQVYSGYPLTFG
GGTKVEIKRTVAAPSVFIFPPSDEQLKSGTASVVCLLNNFYPREAKVQWKVDNALQSGNS
QESVTEQDSKDSTYSLSSTLTLSKADYEKHKVYACEVTHQGLSSPVTKSFNRGECDKTHT
SPPSPAPEAAGGPSEVRPEEPLVVKVEEGDNAVLQCLKGTSDGPTQQLTWSRESPLKPFL
KLSLGLPGLGIHMRPLAIWLFIFNVSQQMGGFYLCQPGPPSEKAWQPGWTVNVEGSG
SEQ ID NO. 12
MEFGLSWVFLVALFRGVQCQVQLVQSGAEVKKPGASVKVSCKASGYTFTDYYMHWVRQAP
GQGLEWMGRVNPNRRGTTYNQKFEGRVTMTTDTSTSTAYMELRSLRSDDTAVYYCARANW
LDYWGQGTTVTVSSASTKGPSVFPLAPCSRSTSESTAALGCLVKDYFPEPVTVSWNSGAL
TSGVHTFPAVLQSSGLYSLSSVVTVPSSSLGTKTYTCNVDHKPSNTKVDKRVESKYGPPC
PPCPAPEAAGGPSVFLFPPKPKDTLMISRTPEVTCVVVDVSQEDPEVQFNWYVDGVEVHN
AKTKPREEQFNSTYRVVSVLTVLHQDWLNGKEYKCKVSNKGLPSSIEKTISKAKGQPREP
QVYTLPPSQEEMTKNQVSLTCLVKGFYPSDIAVEWESNGQPENNYKTTPPVLDSDGSFFL
YSRLTVDKSRWQEGNVFSCSVMHEALHNHYTQKSLSLSLGGGGGSGGGGSGGGGSEVRPE
EPLVVKVEEGDNAVLQCLKGTSDGPTQQLTWSRESPLKPFLKLSLGLPGLGIHMRPLAIW
LFIFNVSQQMGGFYLCQPGPPSEKAWQPGWTVNVEGSG
SEQ ID NO. 13
METDTLLLWVLLLWVPGSTGDIQMTQTTSSLSASLGDRVTISCRASQDISKYLNWYQQKP
DGTVKLLIYHTSRLHSGVPSRFSGSGSGTDYSLTISNLEQEDIATYFCQQGNTLPYTFGG
GTKLEITGGGGSGGGGSGGGGSGGGGSEVKLQESGPGLVAPSQSLSVTCTVSGVSLPDYG
VSWIRQPPRKGLEWLGVIWGSETTYYNSALKSRLTIIKDNSKSQVFLKMNSLQTDDTAIY
YCAKHYYYGGSYAMDYWGQGTSVTVSSPSQFRVSPLDRTWNLGETVELKCQVLLSNPTSG
CSWLFQPRGAAASPTFLLYLSQNKPKAAEGLDTQRFSGKRLGDTFVLTLSDFRRENEGYY
FCSALSNSIMYFSHFVPVFLPAKPTTTPAPRPPTPAPTIASQPLSLRPEACRPAAGGAVH
TRGLDFACDIYIWAPLAGTCGVLLLSLVITRSKRSRLLHSDYMNMTPRRPGPTRKHYQPY
APPRDFAAYRSKRGRKKLLYIFKQPFMRPVQTTQEEDGCSCRFPEEEEGGCELRVKFSRS
ADAPAYQQGQNQLYNELNLGRREEYDVLDKRRGRDPEMGGKPQRRKNPQEGLYNELQKDK
[sequence omitted]
SEQ ID NO. 14
MPPPRLLFFLLFLTPMEVRPEEPLVVKVEEGDNAVLQCLKGTSDGPTQQLTWSRESPLKP
FLKLSLGLPGLGIHMRPLAIWLFIFNVSQQMGGFYLCQPGPPSEKAWQPGWTVNVEGSGH
HHHHH
SEQ ID NO. 15
MPPPRLLFFLLFLTPMEVRPEEPLVVKVEEGDNAVLQCLKGTSDGPTQQLTWSRESPLKP
FLKLSLGLPGLGIHMRPLAIWLFIFNVSQQMGGFYLCQPGPPSEKAWQPGWTVNVEGSGD
KTHTCPPCPAPELLGGPSVFLFPPKPKDTLMISRTPEVTCVVVDVSHEDPEVKFNWYVDG
VEVHNAKTKPREEQYNSTYRVVSVLTVLHQDWLNGKEYKCKVSNKALPAPIEKTISKAKG
QPREPQVYTLPPSREEMTKNQVSLTCLVKGFYPSDIAVEWESNGQPENNYKTTPPVLDSD
GSFFLYSKLTVDKSRWQQGNVFSCSVMHEALHNHYTQKSLSLSPG
SEQ ID NO. 16
MEFGLSWVFLVALFRGVQCEVQLVESGGGLVQPGGSLRLSCAASGFNIKDTYIHWVRQAP
GKGLEWVARIYPTNGYTRYADSVKGRFTISADTSKNTAYLQMNSLRAEDTAVYYCSRWGG
DGFYAMDYWGQGTLVTVSSASTGGGGSGGGGSGGGGSDIQMTQSPSSLSASVGDRVTITC
RASQDVNTAVAWYQQKPGKAPKLLIYSASFLYSGVPSRFSGSRSGTDFTLTISSLQPEDF
ATYYCQQHYTTPPTFGQGTKVEIKRTGPHHHHHH
SEQ ID NO. 17
MEFGLSWVFLVALFRGVQCQVQLVQSGAEDKKPGESVKISCKASGYTFTNYGMNWVRQAP
GQGLKWMGWINTYTGESTYADDFKGRFAFSLDTSASTAYLQLSSLRGEDTAVYFCARFAI
KGDYWGQGTTVTVSSASTGGGGSGGGGSGGGGSGGGGSDIVMTQSPLSLEVSPGEPASIS
CRSTKSLLHSDGITYLYWYLQKPGQSPQLLIYQLSNLASGVPDRFSSSGSGTDFTLKISR
VEAEDEGTYYCAQNLEIPRTFGQGTKLEIKRTGPHHHHHH
SEQ ID NO. 18
METDTLLLWVLLLWVPGSTGDIVMTQSPLSLPVTPGEPASISCRSTKSLLHSDGITYLYW
YLQKPGQSPQLLIYQLSNLASGVPDRFSSSGSGTDFTLKISRVEAEDEGVYYCAQNLEIP
RTFGCGTKLEIKRTGGGGSGGGGSGGGGSGGGGSQVQLVQSGAEVKKPGESVKISCKASG
YTFTNYGMNWVRQAPGQCLKWMGWINTYTGESTYADDFKGRFAFSLDTSASTAYLQLSSL
RSEDTAVYFCARFAIKGDYWGQGTLVTVSSGPHHHHHH
SEQ ID NO. 19
MEFGLSWVFLVALFRGVQCQVQLVQSGAEDVKPDASVKLSCKASGYTFTDYYMHWVRQAP
GQGLEWMGRVNPNRRGTTYNQKFEGRVTMTTDTSTSTAYMQLSSLRGEDTAVYYCARANW
LDYWGQGTTVTVSSASTGGGGSGGGGSGGGGSGGGGSDIQMTQSPSSLEASVGDRVTITC
SVSSSVSSIYLHWYQQKPGKSPKLLIYSTSNLASGVPDRFSGSGSGTDFTLTISSLQAED
EGTYYCQVYSGYPLTFGGGTKLEIKRTGPHHHHHH
SEQ ID NO. 20
METDTLLLWVLLLWVPGSTGDIQMTQSPSSLSASVGDRVTITCSVSSSVSSIYLHWYQQK
PGKAPKLLIYSTSNLASGVPSRFSGSGSGTDFTLTISSLQPEDEATYYCQVYSGYPLTFG
CGTKVEIKRTGGGGSGGGGSGGGGSGGGGSQVQLVQSGAEDKKPGASVKVSCKASGYTFT
DYYMHWVRQAPGQCLEWMGRVNPNRRGTTYNQKFEGRVTMTTDTSTSTAYMELRSLRSDD
TAVYYCARANWLDYWGQGTTVTVSSGPHHHHHH
SEQ ID NO. 21
MEFGLSWVFLVALFRGVQCQVQLQESGPGDVKPSETLSLTCTVSGGSVSSGDYYWTWIRQ
SPGKGLEWIGHIYYSGNTNYNPSLKSRLTISIDTSKTTFSLQLSSVTGEDTAIYYCVRDR
VTGAFDIWGQGTTVTVSSASTGGGGSGGGGSGGGGSGGGGSDIQMTQSPSSLEASVGDRV
TITCQASQDISNYLNWYQQKPGKSPKLLIYDASNLETGVPDRFSGSGSGTDFTFTISSLQ
AEDEGTYFCQHFDHLPLAFGGGTKLEIKRTGPHHHHHH
SEQ ID NO. 22
METDTLLLWVLLLWVPGSTGDIQMTQSPSSLSASVGDRVTITCQASQDISNYLNWYQQKP
GKAPKLLIYDASNLETGVPSRFSGSGSGTDFTFTISSLQPEDEATYFCQHFDHLPLAFGC
GTKVEIKRTGGGGSGGGGSGGGGSGGGGSQVQLQESGPGDVKPSETLSLTCTVSGGSVSS
GDYYWTWIRQSPGKCLEWIGHIYYSGNTNYNPSLKSRLTISIDTSKTQFSLKLSSVTAAD
TAIYYCVRDRVTGAFDIWGQGTTVTVSSGPHHHHHH
SEQ ID NO. 23
MPPPRLLFFLLFLTPMEVRHHHHHHPEEPLVVKVEEGDNAVLQCLKGTSDGPTQQLTWSR
ESPLKPFLKLSLGLPGLGIHMRPLAIWLFIFNVSQQMGGFYLCQPGPPSEKAWQPGWTVN
VEGSGELFRWNVSDLGGLGCGLKNRSSEGPSSPSGKLMSPKLYVWAKDRPEIWEGEPPCL
PPRDSLNQSLSQDLTMAPGSTLWLSCGVPPDSVSRGPLSWTHVHPKGPKSLLSLELKDDR
PARDMWVMETGLLLPRATAQDAGKYYCHRGNLTMSFHLEITARPGGGGSGGGGSGGGGSV
RSSSRTPSDKPVAHVVANPQAEGQLQWLNRRANALLANGVELRDNQLVVPSEGLYLIYSQ
VLFKGQGCPSTHVLLTHTISRIAVSYQTKVNLLSAIKSPCQRETPEGAEAKPWYEPIYLG
GVFQLEKGDRLSAEINRPDYLDFAESGQVYFGIIAL
SEQ ID NO. 24
MEFGLSWVFLVALFRGVQCEVQLVESGGGLVQPGGSLRLSCAASGFNIKDTYIHWVRQAP
GKGLEWVARIYPTNGYTRYADSVKGRFTISADTSKNTAYLQMNSLRAEDTAVYYCSRWGG
DGFYAMDYWGQGTLVTVSSASTGGGGSGGGGSGGGGSDIQMTQSPSSLSASVGDRVTITC
RASQDVNTAVAWYQQKPGKAPKLLIYSASFLYSGVPSRFSGSRSGTDFTLTISSLQPEDF
ATYYCQQHYTTPPTFGQGTKVEIKRTDKTHTSPPSPAPEAAGGPSEVRPEEPLVVKVEEG
DNAVLQCLKGTSDGPTQQLTWSRESPLKPFLKLSLGLPGLGIHMRPLAIWLFIFNVSQQM
GGFYLCQPGPPSEKAWQPGWTVNVEGSGSRGPHHHHHH
SEQ ID NO. 25
MEFGLSWVFLVALFRGVQCEVQLVESGGGLVQPGGSLRLSCAASGFNIKDTYIHWVRQAP
GKGLEWVARIYPTNGYTRYADSVKGRFTISADTSKNTAYLQMNSLRAEDTAVYYCSRWGG
DGFYAMDYWGQGTLVTVSSASTGGGGSGGGGSGGGGSDIQMTQSPSSLSASVGDRVTITC
RASQDVNTAVAWYQQKPGKAPKLLIYSASFLYSGVPSRFSGSRSGTDFTLTISSLQPEDF
ATYYCQQHYTTPPTFGQGTKVEIKRTDKTHTSPPSPAPEAAGGPSEVRPEEPLVVKVEEG
DNAVLQCLKGTSDGPTQQLTWSRESPLKPFLKLSLGLPGLGIHMRPLAIWLFIFNVSQQM
GGFYLCQPGPPSEKAWQPGWTVNVEGSGDKTHTCPPCPAPELLGGPSVFLFPPKPKDTLM
ISRTPEVTCVVVDVSHEDPEVKFNWYVDGVEVHNAKTKPREEQYNSTYRVVSVLTVLHQD
WLNGKEYKCKVSNKALPAPIEKTISKAKGQPREPQVYTLPPSREEMTKNQVSLTCLVKGF
YPSDIAVEWESNGQPENNYKTTPPVLDSDGSFFLYSKLTVDKSRWQQGNVFSCSVMHEAL
HNHYTQKSLSLSPG
SEQ ID NO. 26
MPPPRLLFFLLFLTPMEVRPEEPLVVKVEEGDNAVLQCLKGTSDGPTQQLTWSRESPLKP
FLKLSLGLPGLGIHMRPLAIWLFIFNVSQQMGGFYLCQPGPPSEKAWQPGWTVNVEGSGG
GGGSGGGGSGGGGSGGGGSEVQLVESGGGLVQPGGSLRLSCAASGFNIKDTYIHWVRQAP
GKGLEWVARIYPTNGYTRYADSVKGRFTISADTSKNTAYLQMNSLRAEDTAVYYCSRWGG
DGFYAMDYWGQGTLVTVSSASTGGGGSGGGGSGGGGSDIQMTQSPSSLSASVGDRVTITC
RASQDVNTAVAWYQQKPGKAPKLLIYSASFLYSGVPSRFSGSRSGTDFTLTISSLQPEDF
ATYYCQQHYTTPPTFGQGTKVEIKRTSRGPHHHHHH
SEQ ID NO. 27
MPPPRLLFFLLFLTPMEVRPEEPLVVKVEEGDNAVLQCLKGTSDGPTQQLTWSRESPLKP
FLKLSLGLPGLGIHMRPLAIWLFIFNVSQQMGGFYLCQPGPPSEKAWQPGWTVNVEGSGG
GGGSGGGGSGGGGSGGGGSEVQLVESGGGLVQPGGSLRLSCAASGFNIKDTYIHWVRQAP
GKGLEWVARIYPTNGYTRYADSVKGRFTISADTSKNTAYLQMNSLRAEDTAVYYCSRWGG
DGFYAMDYWGQGTLVTVSSASTGGGGSGGGGSGGGGSDIQMTQSPSSLSASVGDRVTITC
RASQDVNTAVAWYQQKPGKAPKLLIYSASFLYSGVPSRFSGSRSGTDFTLTISSLQPEDF
ATYYCQQHYTTPPTFGQGTKVEIKRTDKTHTCPPCPAPELLGGPSVFLFPPKPKDTLMIS
RTPEVTCVVVDVSHEDPEVKFNWYVDGVEVHNAKTKPREEQYNSTYRVVSVLTVLHQDWL
NGKEYKCKVSNKALPAPIEKTISKAKGQPREPQVYTLPPSREEMTKNQVSLTCLVKGFYP
SDIAVEWESNGQPENNYKTTPPVLDSDGSFFLYSKLTVDKSRWQQGNVFSCSVMHEALHN
HYTQKSLSLSPG
SEQ ID NO. 28
MPPPRLLFFLLFLTPMEVRPEEPLVVKVEEGDNAVLQCLKGTSDGPTQQLTWSRESPLKP
FLKLSLGLPGLGIHMRPLAIWLFIFNVSQQMGGFYLCQPGPPSEKAWQPGWTVNVEGSGE
LFRWNVSDLGGLGCGLKNRSSEGPSSPSGKLMSPKLYVWAKDRPEIWEGEPPCLPPRDSL
NQSLSQDLTMAPGSTLWLSCGVPPDSVSRGPLSWTHVHPKGPKSLLSLELKDDRPARDMW
VMETGLLLPRATAQDAGKYYCHRGNLTMSFHLEITARPHHHHHH
SEQ ID NO. 29
MPPPRLLFFLLFLTPMEVRPEEPLVVKVEEGDNAVLQCLKGTSDGPTQQLTWSRESPLKP
FLKLSLGLPGLGIHMRPLAIWLFIFNVSQQMGGFYLCQPGPPSEKAWQPGWTVNVEGSGE
LFRWNVSDLGGLGCGLKNRSSEGPSSPSGKLMSPKLYVWAKDRPEIWEGEPPCLPPRDSL
NQSLSQDLTMAPGSTLWLSCGVPPDSVSRGPLSWTHVHPKGPKSLLSLELKDDRPARDMW
VMETGLLLPRATAQDAGKYYCHRGNLTMSFHLEITARPDKTHTCPPCPAPELLGGPSVFL
FPPKPKDTLMISRTPEVTCVVVDVSHEDPEVKFNWYVDGVEVHNAKTKPREEQYNSTYRV
VSVLTVLHQDWLNGKEYKCKVSNKALPAPIEKTISKAKGQPREPQVYTLPPSREEMTKNQ
VSLTCLVKGFYPSDIAVEWESNGQPENNYKTTPPVLDSDGSFFLYSKLTVDKSRWQQGNV
FSCSVMHEALHNHYTQKSLSLSPG
SEQ ID NO. 30
MPPPRLLFFLLFLTPMEVRPRDSLNQSLSQDLTMAPGSTLWLSCGVPPDSVSRGPLSWTH
VHPKGPKSLLSLELKDDRPARDMWVMETGLLLPRATAQDAGKYYCHRGNLTMSFHLEITA
RPHHHHHH
SEQ ID NO. 31
MPPPRLLFFLLFLTPMEVRPRDSLNQSLSQDLTMAPGSTLWLSCGVPPDSVSRGPLSWTH
VHPKGPKSLLSLELKDDRPARDMWVMETGLLLPRATAQDAGKYYCHRGNLTMSFHLEITA
RPDKTHTCPPCPAPELLGGPSVFLFPPKPKDTLMISRTPEVTCVVVDVSHEDPEVKFNWY
VDGVEVHNAKTKPREEQYNSTRYVVSVLTVLHQDWLNGKEYKCKVSNKALPAPIEKTISK
AKGQPREPQVYTLPPSREEMTKNQVSLTCLVKGFYPSDIAVEWESNGQPENNYKTTPPVL
DSDGSFFLYSKLTVDKSRWQQGNVFSCSVMHEALHNHYTQKSLSLSPG
SEQ ID NO. 32
MPPPRLLFFLLFLTPMEVRPEEPLVVKVEEGDNAVLQCLKGTSDGPTQQLTWSRESPLKP
FLKLSLGLPGLGIHMRPLAIWLFIFNVSQQMGGFYLCQPGPPSEKAWQPGWTVNVEGSGE
LFRWNVSDLGGLGCGLKNRSSEGPSSPSGKLMSPKLYVWAKDRPEIWEGEPPCLPPRDSL
NQSLSQDLTMAPGSTLWLSCGVPPDSVSRGPLSWTHVHPKGPKSLLSLELKDDRPARDMV
VMETGLLLPRATAQDAGKYYCHRGNLTMSFHLEITARPGGGGSGGGGSGGGGSDIQMTQS
PSSLSASVGDRVTITCQASQDISNYLNWYQQKPGKAPKLLIYDASNLETGVPSRFSGSGS
GTDFTFTISSLQPEDIATYFCQHFDHLPLAFGGGTKVEIKRTVAAPSVFIFPPSDEQLKS
GTASVVCLLNNFYPREAKVQWKVDNALQSGNSQESVTEQDSKDSTYSLSSTLTLSKADYE
KHKVYACEVTHQGLSSPVTKSFNRGEC
SEQ ID NO. 33
MPPPRLLFFLLFLTPMEVRPEEPLVVKVEEGDNAVLQCLKGTSDGPTQQLTWSRESPLKP
FLKLSLGLPGLGIHMRPLAIWLFIFNVSQQMGGFYLCQPGPPSEKAWQPGWTVNVEGSGE
LFRWNVSDLGGLGCGLKNRSSEGPSSPSGKLMSPKLYVWAKDRPEIWEGEPPCLPPRDSL
NQSLSQDLTMAPGSTLWLSCGVPPDSVSRGPLSWTHVHPKGPKSLLSLELKDDRPARDMW
VMETGLLLPRATAQDAGKYYCHRGNLTMSFHLEITARPGGGGSGGGGSGGGGSQVQLQES
GPGLVKPSETLSLTCTVSGGSVSSGDYYWTWIRQSPGKGLEWIGHIYYSGNTNYNPSLKS
RLTISIDTSKTQFSLKLSSVTAADTAIYYCVRDRVTGAFDIWGQGTMVTVSSASTKGPSV
FPLAPCSRSTSESTAALGCLVKDYFPEPVTVSWNSGALTSGVHTFPAVLQSSGLYSLSSV
VTVPSSNFGTQTYTCNVDHKPSNTKVDKTVERKCCVECPPCPAPPVAGPSVFLFPPKPKD
TLMISRTPEVTCVVVDVSHEDPEVQFNWYVDGVEVHNAKTKPREEQFQSTFRVVSVLTVV
HQDWLNGKEYKCKVSNKGLPAPIEKTISKTKGQPREPAVYTLPPSREEMTKNQVSLTCLV
KGFYPSDIAVEWESNGQPENNYKTTPPMLDSDGSFFLYSKLTVDKSRWQQGNVFSCSVMH
EALHNHYTQKSLSLSPG
SEQ ID NO. 34
METDTLLLWVLLLWVPGSTGDIQMTQSPSSLSASVGDRVTITCQASQDISNYLNWYQQKP
GKAPKLLIYDASNLETGVPSRFSGSGSGTDFTFTISSLQPEDIATYFCQHFDHLPLAFGG
KTKVEIKRTVAAPSVFIFPPSDEQLKSGTASVVCLLNNFYPREAKVQWKVDNALQSGNSQ
ESVTEQDSKDSTYSLSSTLTLSKADYEKHKVYACEVTHQGLSSPVTKSFNRGECDKTHTS
PPSPAPEAAGGPSPEEPLVVKVEEGDNAVLQCLKGTSDGPTQQLTWSRESPLKPFLKLSL
GLPGLGIHMRPLAIWLFIFNVSQQMGGFYLCQPGPPSEKAWQPGWTVNVEGSGELFRWNV
SDLGGLGCGLKNRSSEGPSSPSGKLMSPKLYVWAKDRPEIWEGEPPCLPPRDSLNQSLSQ
DLTMAPGSTLWLSCGVPPDSVSRGPLSWTHVHPKGPKSLLSLELKDDRPARDMWVMETGL
LLPRATAQDAGKYYCHRGNLTMSFHLEITARP
SEQ ID NO. 35
MEFGLSWVFLVALFRGVQCQVQLQESGPGLVKPSETLSLTCTVSGGSVSSGDYYWTWIRQ
SPGKGLEWIGHIYYSGNTNYNPSLKSRLTISIDTSKTQFSLKLSSVTAADTAIYYCVRDR
VTGAFDIWGQGTMVTVSSASTKGPSVFPLAPCSRSTSESTAALGCLVKDYFPEPVTVSWN
SGALTSGVHTFPAVLQSSGLYSLSSVVTVPSSNFGTQTYTCNVDHKPSNTKVDKTVERKC
CVECPPCPAPPVAGPSVFLFPPKPKDTLMISRTPEVTCVVVDVSHWDPEVQFNWYVDGVE
VHNAKTKPREEQFQSTFRVVSVLTVVHQDWLNGKEYKCKVSNKGLPAPIEKTISKTKGQP
REPQVYTLPPSREEMTKNQVSLTCLVKGFYPSDIAVEWESNGQPENNYKTTPPMLDSDGS
FFLYSKLTVDKSRWQQGNVFSCSVMHEALHNHYTQKSLSLSPGGGGGSGGGGSGGGGSPE
EPLVVKVEEGDNAVLQCLKGTSDGPTQQLTWSRESPLKPFLKLSLGLPGLGIHMRPLAIW
LFIFNVSQQMGGFYLCQPGPPSEKAWQPGWTVNVEGSGELFRWNVSDLGGLGCGLKNRSS
EGPSSPSGKLMSPKLYVWAKDRPEIWEGEPPCLPPRDSLNQSLSQDLTMAPGSTLWLSCG
VPPDSVSRGPLSWTHVHPKGPKSLLSLELKDDRPARDMWVMETGLLLPRATAQDAGKYYC
HRGNLTMSFHLEITARP
SEQ ID NO. 36
MPPPRLLFFLLFLTPMEVRPEEPLVVKVEEGDNAVLQCLKGTSDGPTQQLTWSRESPLKP
FLKLSLGLPGLGIHMRPLAIWLFIFNVSQQMGGFYLCQPGPPSEKAWQPGWTVNVEGSGE
LFRWNVSDLGGLGCGLKNRSSEGPSSPSGKLMSPKLYVWAKDRPEIWEGEPPCLPPRDSL
NQSLSQDLTMAPGSTLWLSCGVPPDSVSRGPLSWTHVHPKGPKSLLSLELKDDRPARDMW
VMETGLLLPRATAQDAGKYYCHRGNLTMSFHLEITARPGGGGSGGGGSGGGGSDIQMTQS
PSSLSASVGDRVTITSCVSSSVSSIYLHWYQQKPGKAPKLLIYSTSNLASGVPSRFSGSG
SGTDFTLTISSLQPEDFATYYCQVYSGYPLTFGGGTKVEIKRTVAAPSVFIFPPSDEQLK
SGTASVVCLLNNFYPREAKVQWKVDNALQSGNSQESVTEQDSKDSTYSLSSTLTLSKADY
EKHKVYACEVTHQGLSSPVTKSFNRGEC
SEQ ID NO. 37
MPPPRLLFFLLFLTPMEVRPEEPLVVKVEEGDNAVLQCLKGTSDGPTQQLTWSRESPLKP
FLKLSLGLPGLGIHMRPLAIWLFIFNVSQQMGGFYLCQPGPPSEKAWQPGWTVNVEGSGE
LFRWNVSDLGGLGCGLKNRSSEGPSSPSGKLMSPKLYVWAKDRPEIWEGEPPCLPPRDSL
NQSLSQDLTMAPGSTLWLSCGVPPDSVSRGPLSWTHVHPKGPKSLLSLELKDDRPARDMW
VMETGLLLPRATAQDAGKYYCHRGNLTMSFHLEITARPGGGGSGGGGSGGGGSQVQLVQS
GAEVKKPGASVKVSCKASGYTFTDYYMHWVRQAPGQGLEWMGRVNPNRRGTTYNQKFEGR
VTMTTDTSTSTAYMELRSLRSDDTAVYYCARANWLDYWGQGTTVTVSSASTKGPSVFPLA
PCSRSTSESTAALGCLVKDYFPEPVTVSWNSGALTSGVHTFPAVLQSSGLYSLSSVVTVP
SSSLGTKTYTCNVDHKPSNTKVDKRVESKYGPPCPPCPAPEAAGGPSVFLFPPKPKDTLM
ISRTPEVTCVVVDVSQEDPEVQFNWYVDGVEVHNAKTKPREEQFNSTYRVVSVLTVLHQD
WLNGKEYKCKVSNKGLPSSIEKTISKAKGQPREPQVYTLPPSQEEMTKNQVSLTCLVKGF
YPSDIAVEWESNGQPENNYKTTPPVLDSDGSFFLYSRLTVDKSRWQEGNVFSCSVMHEAL
HNHYTQKSLSLSL
SEQ ID NO. 38
METDTLLLWVLLLWVPGSTGDIQMTQSPSSLSASVGDRVTITCSVSSSVSSIYLHWYQQK
PGKAPKLLIYSTSNLASGVPSRFSGSGSGTDFTLTISSLQPEDFATYYCQVYSGYPLTFG
GGTKVEIKRTVAAPSVFIFPPSDEQLKSGTASVVCLLNNFYPREAKVQWKVDNALQSGNS
QESVTEQDSKDSTYSLSSTLTLSKADYEKHKVYACEVTHQGLSSPVTKSFNRGECDKTHT
SPPSPAPEAAGGPSPEEPLVVKVEEGDNAVLQCLKGTSDGPTQQLTWSRESPLKPFLKLS
LGLPGLGIHMRPLAIWLFIFNVSQQMGGFYLCQPGPPSEKAWQPGWTVNVEGSGELFRWN
VSDLGGLGCGLKNRSSEGPSSPSGKLMSPKLYVWAKDRPEIWEGEPPCLPPRDSLNQSLS
QDLTMAPGSTLWLSCGVPPDSVSRGPLSWTHVHPKGPKSLLSLELKDDRPARDMWVMETG
LLLPRATAQDAGKYYCHRGNLTMSFHLEITARP
SEQ ID NO. 39
MEFGLSWVFLVALFRGVQCQVLQLVQSGAEVKKPGASVKVSCKASGYTFTDYYMWVRQAP
GQGLEWMGRVNPNRRGTTYNQKFEGRVTMTTDTSTSTAYMELRSLRSDDTAVYYCARANW
LDYWGQGTTVTVSSASTKGPSVFPLAPCSRSTSESTAALGCLVKDYFPEPVTVSWNSGAL
TSGVHTFPAVLQSSGLYSLSSVVTVPSSSLGTKTYTCNVDHKPSNTKVDKRVESKYGPPC
PPCPAPEAAGGPSVFLFPPKPKDTLMISRTPEVTCVVVDVSQEDPEVQFNWYVDGVEVHN
AKTKPREEQFNSTYRVVSVLTVLHQDWLNGKEYKCKVSNKGLPSSIEKTISKAKGQPREP
QVYTLPPSQEEMTKNQVSLTCLVKGFYPSDIAVEWESNGQPENNYKTTPPVLDSDGSFFL
YSRLTVDKSRWQEGNVFSCSVMHEALHNHYTQKSLSLSLGGGGGSGGGGSGGGGSPEEPL
VVKVEEGDNAVLQCLKGTSDGPTQQLTWSRESPLKPFLKLSLGLPGLGIHMRPLAIWLFI
FNVSQQMGGFYLCQPGPPSEKAWQPGWTVNVEGSGELFRWNVSDLGGLGCGLKNRSSEGP
SSPSGKLMSPKLYVWAKDRPEIWEGEPPCLPPRDSLNQSLSQDLTMAPGSTLWLSCGVPP
DSVSRGPLSWTHVHPKGPKSLLSLELKDDRPARDMWVMETGLLLPRATAQDAGKYYCHRG
NLTMSFHLEITARP
SEQ ID NO. 40
MEFGLSWVFLVALFRGVQCEVQLVESGGGLVQPGGSLRLSCAASGFNIKDTYIHWVRQAP
GKGLEWVARIYPTNGYTRYADSVKGRFTISADTSKNTAYLQMNSLRAEDTAVYYCSRWGG
DGFYAMDYWGQGTLVTVSSASTGGGGSGGGGSGGGGSDIQMTQSPSSLSASVGDRVTITC
RASQDVNTAVAWYQQKPGKAPKLLIYSASFLYSGVPSRFSGSRSGTDFTLTISSLQPEDF
ATYYCQQHYTTPPTFGQGTKVEIKRTDKTHTSPPSPAPEAAGGPSPEEPLVVKVEEGDNA
VLQCLKGTSDGPTQQLTWSRESPLKPFLKLSLGLPGLGIHMRPLAIWLFIFNVSQQMGGF
YLCQPGPPSEKAWQPGWTVNVEGSGELFRWNVSDLGGLGCGLKNRSSEGPSSPSGKLMSP
KLYVWAKDRPEIWEGEPPCLPPRDSLNQSLSQDLTMAPGSTLWLSCGVPPDSVSRGPLSW
THVHPKGPKSLLSLELKDDRPARDMWVMETGLLLPRATAQDAGKYYCHRGNLTMSFHLEI
TARPSRGPHHHHHH
SEQ ID NO. 41
MEFGLSWVFLVALFRGVQCEVQLVESGGGLVQPGGSLRLSCAASGFNIKDTYIHWVRQAP
GKGLEWVARIYPTNGYTRYADSVKGRFTISADTSKNTAYLQMNSLRAEDTAVYYCSRWGG
DGFYAMDYWGQGTLVTVSSASTGGGGSGGGGSGGGGSDIQMTQSPSSLSASVGDRVTITC
RASQDVNTAVAWYQQKPGKAPKLLIYSASFLYSGVPSRFSGSRSGTDFTLTISSLQPEDF
ATYYCQQHYTTPPTFGQGTKVEIKRTDKTHTSPPSPAPEAAGGPSPEEPLVVKVEEGDNA
VLQCLKGTSDGPTQQLTWSRESPLKPFLKLSLGLPGLGIHMRPLAIWLFIFNVSQQMGGF
YLCQPGPPSEKAWQPGWTVNVEGSGELFRWNVSDLGGLGCGLKNRSSEGPSSPSKKLMSP
KLYVWAKDRPEIWEGEPPCLPPRDSLNQSLSQDLTMAPGSTLWLSCGVPPDSVSRGPLSW
THVHPKGPKSLLSLELKDDRPARDMWVMETGLLLPRATAQDAGKYYCHRGNLTMSFHLEI
TARPDKTHTCPPCPAPELLGGPSVFLFPPKPKDTLMISRTPEVTCVVVDVSHEDPEVKFN
WYVDGVEVHNAKTKPREEQYNSTYRVVSVLTVLHQDLNGKEYKCKVSNAKALPAPIEKTI
SKAKGQPREPQVYTLPPSREEMTKNQVSLTCLVKGFYPSDIAVEWESNGQPENNYKTTPP
VLDSDGSFFLYSLKTVDKSRWQQGNVFSCSVMHEALHNHYTQKSLSLSPG
SEQ ID NO. 42
MPPPRLLFFLLFLTPMEVRPEEPLVVKVEEGDNAVLQCLKGTSDGPTQQLTWSRESPLKP
FLKLSLGLPGLGIHMRPLAIWLFIFNVSQQMGGFYLCQPGPPSEKAWQPGWTVNVEGSGE
LFRWNVSDLGGLGCGLKNRSSEGPSSPSGKLMSPKLYVWAKDRPEIWEGEPPCLPPRDSL
NQSLSQDLTMAPGSTLWLSCGVPPDSVSRGPLSWTHVHPKGPKSLLSLELKDDRPARDMW
VMETGLLLPRATAQDAGKYYCHRGNLTMSFHLEITARPGGGGSGGGGSGGGGSGGGGSEV
QLVESGGGLVQPGGSLRLSCAASGFNIKDTYIHWVRQAPGKGLEWVARIYPTNGYTRYAD
SVKGRFTISADTSKNTAYLQMNSLRAEDTAVYYCSRWGGDGFYAMDYWGQGTLVTVSSAS
TGGGGSGGGGSGGGGSDIQMTQSPSSLSASVGDRVTITCRASQDVNTAVAWYQQKPGKAP
KLLIYSASFLYSGVPSRFSGSRSGTDFTLTISSLQPEDFATYYCQQHYTTPPTFGQGTKV
EIKRTSRGPHHHHHH
SEQ ID NO. 43
MPPPRLLFFLLFLTPMEVRPEEPLVVKVEEGDNAVLQCLKGTSDGPTQQLTWSRESPLKP
FLKLSLGLPGLGIHMRPLAIWLFIFNVSQQMGGFYLCQPGPPSEKAWQPGWTVNVEGSGE
LFRWNVSDLGGLGCGLKNRSSEGPSSPSGKLMSPKLYVWAKDRPEIWEGEPPCLPPRDSL
NQSLSQDLTMAPGSTLWLSCGVPPDSVSRGPLSWTHVHPKGPKSLLSLELKDDRPARDMW
VMETGLLLPRATAQDAGKYYCHRGNLTMSFHLEITARPGGGGSGGGGSGGGGSGGGGSEV
QLVESGGGLVQPGGSLRLSCAASGFNIKDTYIHWVRQAPGKGLEWVARIYPTNGYTRYAD
SVKGRFTISADTSKNTAYLQMNSLRAEDTAVYYCSRWGGDGFYAMDYWGQGTLVTVSSAS
TGGGGSGGGGSGGGGSDIQMTQSPSSLSASVGDRVTITCRASQDVNTAVAWYQQKPGKAP
KLLIYSASFLYSGVPSRFSGSRSGTDFTLTISSLQPEDFATYYCQQHYTTPPTFGQGTKV
EIKRTDKTHTCPPCPAPELLGGPSVFLFPPKPKDTLMISRTPEVTCVVVDVSHEDPEVKF
NWYVDGVEVHNAKTKPREEQYNSTYRVVSVLTVLHQDWLNGKEYKCKVSNKALPAPIEKT
ISKAKGQPREPQVYTLPPSREEMTKNQVSLTCLVKGFYPSDIAVEWESNGQPENNYKTTP
PVLDSDGSFFLYSLKTVDKSRWQQGNVFSCSVMHEALHNHYTQKSLSLSGP
SEQ ID NO. 46
MESDESGLPAMEIECRITGTLNGVEFELVGGGEGTPEQGRMTNKMKSTKGALTFSPYLLSHVMGY
GFYHFGTYPSGYENPFLHAINNGGYTNTRIEKYEDGGVLHVSFSYRYEAGRVIGDFKVMGTGFPE
DSVIFTDKIIRSNATVEHLHPMGDNDLDGSFTRTFSLRDGGYYSSVVDSHMHFKSAIHPSILQNG
GPMFAFRRVEEDHSNTELGIVEYQHAFKTPDADAGEERV
SEQ ID NO. 47
MESDESGLPAMEIECRITGTLNGVEFELVGGGEGTPEQGRMTNKMKSTKGALTFSPYLLSHVMGY
GFYHFGTYPSGYENPFLHAINNGGYTNTRIEKYEDGGVLHVSFSYRYEAGRVIGDFKVMGTGFPE
DSVIFTDKIIRSNATVEHLHPMGDNDLDGSFTRTFSLRDGGYYSSVVDSHMHFKSAIHPSILQNG
GPMFAFRRVEEDHSNTELGIVEYQHAFKTPDADAGEERV
SEQ ID NO. 48
MESDESGLPAMEIECRITGTLNGVEFELVGGGEGTPEQGRMTNKMKSTKGALTFSPYLLSHVMGY
GFYHFGTYPSGYENPFLHAINNGGYTNTRIEKYEDGGVLHVSFSYRYEAGRVIGDFKVMGTGFPE
DSVIFTDKIIRSNATVEHLHPMGDNDLDGSFTRTFSLRDGGYYSSVVDSHMHFKSAIHPSILQNG
GPMFAFRRVEEDHSNTELGIVEYQHAFKTPDADAGEERV
SEQ ID NO. 49
MESDESGLPAMEIECRITGTLNGVEFELVGGGEGTPEQGRMTNKMKSTKGALTFSPYLLSHVMGY
GFYHFGTYPSGYENPFLHAINNGGYTNTRIEKYEDGGVLHVSFSYRYEAGRVIGDFKVMGTGFPE
DSVIFTDKIIRSNATVEHLHPMGDNDLDGSFTRTFSLRDGGYYSSVVDSHMHFKSAIHPSILQNG
GPMFAFRRVEEDHSNTELGIVEYQHAFKTPDADAGEERV
SEQ ID NO. 50
MPPPRLLFFLLFLTPMEVRPEEPLVVKVEEGDNAVLQCLKGTSDGPTQQLTWSRESPLKP
FLKLSLGLPGLGIHMRPLAIWLFIFNVSQQMGGFYLCQPGPPSEKAWQPGWTVNVEGSGE
LFRWNVSDLGGLGCGLKNRSSEGPSSPSGKLMSPKLYVWAKDRPEIWEGEPPCLPPRDSL
NQSLSQDLTMAPGSTLWLSCGVPPDSVSRGPLSWTHVHPKGPKSLLSLELKDDRPARDMW
VMETGLLLPRATAQDAGKYYCHRGNLTMSFHLEITARPVLWHWLLRTGGWKGGGGSGGGG
SGGGGSGGGGSQVQLQESGPGLVKPSETLSLTCTVSGGSVSSGDYYWTWIRQSPGKGLEW
IGHIYYSGNTNYNPSLKSRLTISIDTSKTQFSLKLSSVTAADTAIYYCVRDRVTGAFDIW
GQGTMVTVSSASTKGPSVFPLAPCSRSTSESTAALGCLVKDYFPEPVTVSWNSGALTSGV
HTFPAVLQSSGLYSLSSVVTVPSSNFGTQTYTCNVDHKPSNTKVDKTVERKCCVECPPCP
APPVAGPSVFLFPPKPKDTLMISRTPEVTCVVVDVSHEDPEVQFNWYVDGVEVHNAKTKP
REEQFQSTFRVVSVLTVVHQDWLNGKEYKCKVSNKGLPAPIEKTISKTKGQPREPQVYTL
PPSREEMTKNQVSLTCLVKGFYPSDIAVEWESNGQPENNYKTTPPMLDSDGSFFLYSKLT
VDKSRWQQGNVFSCSVMHEALHNHYTQKSLSLSPG
SEQ ID NO. 51
MPPPRLLFFLLFLTPMEVRPEEPLVVKVEEGDNAVLQCLKGTSDGPTQQLTWSRESPLKP
FLKLSLGLPGLGIHMRPLAIWLFIFNVSQQMGGFYLCQPGPPSEKAWQPGWTVNVEGSGE
LFRWNVSDLGGLGCGLKNRSSEGPSSPSGKLMSPKLYVWAKDRPEIWEGEPPCLPPRDSL
NQSLSQDLTMAPGSTLWLSCGVPPDSVSRGPLSWTHVHPKGPKSLLSLELKDDRPARDMW
VMETGLLLPRATAQDAGKYYCHRGNLTMSFHLEITARPVLWHWLLRTGGWKGGGGSGGGG
SGGGGSGGGGSQVQLVQSGAEVKKPGASVKVSCKASGYTFTDYYMHWVRQAPGQGLEWMG
RVNPNRRGTTYNQKFEGRVTMTTDTSTSTAYMELRSLRSDDTAVYYCARANWLDYWGQGT
TVTVSSASTKGPSVFPLAPCSRSTSESTAALGCLVKDYFPEPVTVSWNSGALTSGVHTFP
AVLQSSGLYSLSSVVTVPSSSLGTKTYTCNVDHKPSNTKVDKRVESKYGPPCPPCPAPEA
AGGPSVFLFPPKPKDTLMISRTPEVTCVVVDVSQESPEVQFNWYVDGVEVHNAKTKPREE
QFNSTYRVVSVLTVLHQDWLNGKEYKCKVSNKGLPSSIEKTISKAKGQPREPQVYTLPPS
QEEMTKNQVSLTCLVKGFYPSDIAVEWESNGQPENNYKTTPPVLDSDGSFFLYSRLTVDK
SRWQEGNVFSCSVMHEALHNHYTQKSLSLSL
SEQ ID NO. 52
MPPPRLLFFLLFLTPMEVRPEEPLVVKVEEGDNAVLQCLKGTSDGPTQQLTWSRESPLKP
FLKLSLGLPGLGIHMRPLAIWLFIFNVSQQMGGFYLCQPGPPSEKAWQPGWTVNVEGSGE
LFRWNVSDLGGLGCGLKNRSSEGPSSPSGKLMSPKLYVWAKDRPEIWEGEPPCLPPRDSL
NQSLSQDLTMAPGSTLWLSCGVPPDSVSRGPLSWTHVHPKGPKSLLSLELKDDRPARDMW
VMETGLLLPRATAQDAGKYYCHRGNLTMSFHLEITARPVLWHWLLRTGGWKGGGGSGGGG
SGGGGSGGGGSQVQLVQSGAEVKKPGASVKVSCKASGYTFTDYYMHWVRQAPGQGLEWMG
WINTYTGESTYADDFKGRFAFSLDTSASTAYLQLSSLRGEDTAVYFCARFAIKGDYWGQG
TTVTVSSASTGGGGSGGGGSGGGGSGGGGSDIVMTQSPLSLEVSPGEPASISCRSTKSLL
HSDGITYLYWYLQKPGQSPQLLIYQLSNLASGVPDRFSSSGSGTDFTLKISRVEAEDEGT
YYCAQNLEIPRTFGQGTKLEIKRTHHHHHH
SEQ ID NO. 53
MPPPRLLFFLLFLTPMEVRPEEPLVVKVEEGDNAVLQCLKGTSDGPTQQLTWSRESPLKP
FLKLSLGLPGLGIHMRPLAIWLFIFNVSQQMGGFYLCQPGPPSEKAWQPGWTVNVEGSGE
LFRWNVSDLGGLGCGLKNRSSEGPSSPSGKLMSPKLYVWAKDRPEIWEGEPPCLPPRDSL
NQSLSQDLTMAPGSTLWLSCGVPPDSVSRGPLSWTHVHPKGPKSLLSLELKDDRPARDMW
VMETGLLLPRATAQDAGKYYCHRGNLTMSFHLEITARPVLWHWLLRTGGWKGGGGSGGGG
SGGGGSGGGGSQVQLVQSGAEVKKPGASVKVSCKASGYTFTDYYMHWVRQAPGQGLEWMG
RVNPNRRGTTYNQKFEGRVTMTTDTSTSTAYMQLSSLRGEDTAVYYCARANWLDYWGQGT
TVTVSSASTGGGGSGGGGSGGGGSGGGGSDIQMTQSPSSLEASVGDRVTITCSVSSSVSS
IYLHWYQQKPGKSPKLLIYSTSNLASGVPDRFSGSGSGTDFTLTISSLQAEDEGTYYCQV
YSGYPLTFGGGTKLEIKRTHHHHHH
SEQ ID NO. 54
MPPPRLLFFLLFLTPMEVRPEEPLVVKVEEGDNAVLQCLKGTSDGPTQQLTWSRESPLKP
FLKLSLGLPGLGIHMRPLAIWLFIFNVSQQMGGFYLCQPGPPSEKAWQPGWTVNVEGSGE
LFRWNVSDLGGLGCGLKNRSSEGPSSPSGKLMSPKLYVWAKDRPEIWEGEPPCLPPRDSL
NQSLSQDLTMAPGSTLWLSCGVPPDSVSRGPLSWTHVHPKGPKSLLSLELKDDRPARDMW
VMETGLLLPRATAQDAGKYYCHRGNLTMSFHLEITARPVLWHWLLRTGGWKGGGGSGGGG
SGGGGSGGGGSQVQLQESGPGDVKPSETLSLTCTVSGGSVSSGDYYWTWIRQSPGKGLEW
IGHIYYSGNTNYNPSLKSRLTISIDTSKTTFSLQLSSVTGEDTAIYYCVRDRVTGAFDIW
GQGTTVTVSSASTGGGGSGGGGSGGGGSGGGGSDIQMTQSPSSLEASVGDRVTITCQASQ
DISNYLNWYQQKPGKSPKLLIYDASNLETGVPDRFSGSGSGTDFTFTISSLQAEDEGTYF
CQHFDHLPLAFGGGTKLEIKRTHHHHHH
SEQ ID NO. 55
MPPPRLLFFLLFLTPMEVRPEEPLVVKVEEGDNAVLQCLKGTSDGPTQQLTWSRESPLKP
FLKLSLGLPGLGIHMRPLAIWLFIFNVSQQMGGFYLCQPGPPSEKAWQPGWTVNVEGSGE
LFRWNVSDLGGLGCGLKNRSSEGPSSPSGKLMSPKLYVWAKDRPEIWEGEPPCLPPRDSL
NQSLSQDLTMAPGSTLWLSCGVPPDSVSRGPLSWTHVHPKGPKSLLSLELKDDRPARDMW
VMETGLLLPRATAQDAGKYYCHRGNLTMSFHLEITARPVLWHWLLRTGGWKGGGGSGGGG
SGGGGSGGGGSEVQLVESGGGLVQPGGSLRLSCAASGFNIKDTYIHWVRQAPGKGLEWVA
RIYPTNGYTRYADSVKGRFTISADTSKNTAYLQMNSLRAEDTAVYYCSRWGGDGFYAMDY
WGQGTLVTVSSASTGGGGSGGGGSGGGGSDIQMTQSPSSLSASVGDRVTITCRASQDVNT
AVAWYQQKPGKAPKLLIYSASFLYSGVPSRFSGSRSGTDFTLTISSLQPEDFATYYCQQH
YTTPPTFGQGTKVEIKRTHHHHHH
SEQ ID NO. 56
MPPPRLLFFLLFLTPMEVRPEEPLVVKVEEGDNAVLQCLKGTSDGPTQQLTWSRESPLKP
FLKLSLGLPGLGIHMRPLAIWLFIFNVSQQMGGFYLCQPGPPSEKAWQPGWTVNVEGSGE
LFRWNVSDLGGLGCGLKNRSSEGPSSPSGKLMSPKLYVWAKDRPEIWEGEPPCLPPRDSL
NQSLSQDLTMAPGSTLWLSCGVPPDSVSRGPLSWTHVHPKGPKSLLSLELKDDRPARDMW
VMETGLLLPRATAQDAGKYYCHRGNLTMSFHLEITARPVLWHWLLRTGGWKDKTHTCPPC
PAPELLGGPSVFLFPPKPKDTLMISRTPEVTCVVVDVSHEDPEVKFNWYVDGVEVHNAKT
KPREEQYNSTYRVVSVLTVLHQDWLNGKEYKCKVSNKALPAPIEKTISKAKGQPREPQVY
TLPPSREEMTKNQVSLTCLVKGFYPSDIAVEWESNGQPENNYKTTPPVLDSDGSFFLYSK
LTVDKSRWQQGNVFSCSVMHEALHNHYTQKSLSLSPGGGGGSGGGGSGGGGSGGGGSEVQ
LVESGGGLVQPGGSLRLSCAASGFNIKDTYIHWVRQAPGKGLEWVARIYPTNGYTRYADS
VKGRFTISADTSKNTAYLQMNSLRAEDTAVYYCSRWGGDGFYAMDYWGQGTLVTVSSAST
GGGGSGGGGSGGGGSDIQMTQSPSSLSASVGDRVTITCRASQDVNTAVAWYQQKPGKAPK
LLIYSASFLYSGVPSRFSGSRSGTDFTLTISSLQPEDFATYYCQQHYTTPPTFGQGTKVE
IDRT
SEQ ID NO. 57
MELAALCRWGLLLALLPPGAASTQVCTGTDMKLRLPASPETHLDMLRHLYQGCQVVQGNL
ELTYLPTNASLSFLQDIQEVQGYVLIAHNQVRQVPLQRLRIVRGTQLFEDNYALAVLDNG
DPLNNTTPVTGASPGGLRELQLRSLTEILKGGVLIQRNPQLCYQDTILWKDIFHKNNQLA
LTLIDTNRSRACHPCSPMCKGSRCWGESSEDCQSLTRTVCAGGCARCKGPLPTDCCHEQC
AAGCTGPKHSDCLACLHFNHSGICELHCPALVTYNTDTFESMPNPEGRYTFGASCVTACP
YNYLSTDVGSCTLVCPLHNQEVTAEDGTQRCEKCSKPCARVCYGLGMEHLREVRAVTSAN
IQEFAGCKKIFGSLAFLPESFDGDPASNTAPLQPEQLQVFETLEEITGYLYISAWPDSLP
DLSVFQNLQVIRGRILHNGAYSLTLQGLGISWLGLRSLRELGSGLALIHHNTHLCFVHTV
PWDQLFRNPHQALLHTANRPEDECVGEGLACHQLCARGHCWGPGPTQCVNCSQFLRGQEC
VEECRVLQGLPREYVNARHCLPCHPECQPQNGSVTCFGPEADQCVACAHYKDPPFCVARC
PSGVKPDLSYMPIWKFPDEEGACQPCPINCTHSCVDLDDKGCPAEQRASPLTGGGGSGGG
GSGGGGSGGGGSQVQLQESGPGDVKPSETLSLTCTVSGGSVSSGDYYWTWIRQSPGKGLE
WIGHIYYSGNTNYNPSLKSRLTISIDTSKTTFSLQLSSVTGEDTAIYYCVRDRVTGAFDI
WGQGTTVTVSSASTGGGGSGGGGSGGGGSGGGGSDIQMTQSPSSLEASVGDRVTITCQAS
QDISNYLNWYQQKPGKSPKLLIYDASNLETGVPDRFSGSGSGTDFTFTISSLQAEDEGTY
FCQHFDHLPLAFGGGTKLEIKRTHHHHHH
SEQ ID NO. 58
MELAALCRWGLLLALLPPGAASNRPEDECVGEGLACHQLCARGHCWGPGPTQCVNCSQFL
RGQECVEECRVLQGLPREYVNARHCLPCHPECQPQNGSVTCFGPEADQCVACAHYKDPPF
CVARCPSGVKPDLSYMPIWKFPDEEGACQPCPINCTHSCVDLDDKGCPAEQRASPLTGGG
GSGGGGSGGGGSGGGGSQVQLQESGPGDVKPSETLSLTCTVSGGSVSSGDYYWTWIRQSP
GKGLEWIGHIYYSGNTNYNPSLKSRLTISIDTSKTTFSLQLSSVTGEDTAIYYCVRDRVT
GAFDIWGQGTTVTVSSASTGGGGSGGGGSGGGGSGGGGSDIQMTQSPSSLEASVGDRVTI
TCQASQDISNYLNWYQQKPGKSPKLLIYDASNLETGVPDRFSGSGSGTDFTFTISSLQAE
DEGTYFCQHFDHLPLAFGGGTKLEIKRTHHHHHH
SEQ ID NO. 63
MPPPRLLFFLLFLTPMEVRPEEPLVVKVEEGDNAVLQCLKGTSDGPTQQLTWSRESPLKP
FLKLSLGLPGLGIHMRPLAIWLFIFNVSQQMGGFYLCQPGPPSEKAWQPGWTVNVEGSGE
LFRWNVSDLGGLGCGLKNRSSEGPSSPSGKLMSPKLYVWAKDRPEIWEGEPPCLPPRDSL
NQSLSQDLTMAPGSTLWLSCGVPPDSVSRGPLSWTHVHPKGPKSLLSLELKDDRPARDMW
VMETGLLLPRATAQDAGKYYCHRGNLTMSFHLEITARPVLWHWLLRTGGWKGGGGSGGGG
SGGGGSGGGGSEVQLQQSGAELVKPGASVKMSCKASGYTFTSYNMHWVKQTPGQGLEWIG
AIYPGNGDTSYNQKFKGKATLTADKSSSTAYMQLSSLTSEDSADYYCARSNYYGSSYWFF
DVWGAGTTVTVSSGSTSGGGSGGGSGGGGSSDIVLTQSPAILSASPGEKVTVTCRASSSV
NYMDWYQKKPGSSPKPWIYATSNLASGVPARFSGSGSGTSYSLTISRVEAEDAATYYCQQ
WSFNPPTFGGGTKLEIKHHHHHH
SEQ ID NO. 64
MHLLGPWLLLLVLEYLAFSDSSKWVFEHPETLYAWEGACVWIPCTYRALDGDLESFILFH
NPEYNKNTSKFDGTRLYESTKDGKVPSEQDRVQFLGDKNKACTLSIHPVHLNDSGQLGLR
MESKTEKWMERIHLNVSERPFPPHIQLPPEIQESQEVTLTCLLNFSCYGYPIQLQWLLEG
VPMRQAAVTSTSLTIKSVFTRSELKFSPQWSHHGKIVTCQLQDADGKFLSNDTVQLNVKH
TPKLEIKVTPSDAIVREGDSVTMTCEVSSSNPEYTTVSWLKDGTSLKKQNTFTLNLREVT
KDQSGKYCCQVSNDVGPGRSEEVFLQVQYAPEGGGGSGGGGSGGGGSGGGGSDIQMTQTT
SSLSASLGDRVTISCRASQDISKYLNWYQQKPDGTVKLLIYHTSRLHSGVPSRFSGSGSG
TDYSLTISNLEQEDIATYFCQQGNTLPYTFGGGTKLEITGGGGSGGGGSGGGGSGGGGSE
VKLQESGPGLVAPSQSLSVTCTVSGVSLPDYGVSWIRQPPRKGLEWLGVIWGSETTYYNS
ALKSRLTIIKDNSKSQVFLKMNSLQTDDTAIYYCAKHYYYGGSYAMDYWGQGTSVTVSSH
HHHHH
SEQ ID NO. 65
MHLLGPWLLLLVLEYLAFSDSSKWVFEHPETLYAWEGACVWIPCTYRALDGDLESFILFH
NPEYNKNTSKFDGTRLYESTKDGKVPSEQDRVQFLGDKNKACTLSIHPVHLNDSGQLGLR
MESKTEKWMERIHLNVSERPFPPHIQLPPEIQESQEVTLTCLLNFSCYGYPIQLQWLLEG
VPMRQAAVTSTSLTIKSVFTRSELKFSPQWSHHGKIVTCQLQDADGKFLSNDTVQLNVKH
TPKLEIKVTPSDAIVREGDSVTMTCEVSSSNPEYTTVSWLKDGTSLKKQNTFTLNLREVT
KDQSGKYCCQVSNDVGPGRSEEVFLQVQYAPEGGGGSGGGGSGGGGSGGGGSEVQLQQSG
AELVKPGASVKMSCKASGYTFTSYNMHWVKQTPGQGLEWIGAIYPGNGDTSYNQKFKGKA
TLTADKSSSTAYMQLSSLTSEDSADYYCASNYYGSSYWFFDVWGAGTTVTVSSGSGTSGG
GSGGGSGGGGSSDIVLTQSPAILSASPGEKVTMTCRASSSVNYMDWYQKKPGSSPKPWIY
ATSNLASGVPARFSGSGSGTSYSLTISRVEAEDAATYYCQQWSFNPPTFGGGTKLEIKHH
HHHH
SEQ ID NO. 67
MPPPRLLFFLLFLTPMEVRPEEPLVVKVEEGDNAVLQCLKGTSDGPTQQLTWSRESPLKP
FLKLSLGLPGLGIHMRPLAIWLFIFNVSQQMGGFYLCQPGPPSEKAWQPGWTVNVEGSGE
LFRWNVSDLGGLGCGLKNRSSEGPSSPSGKLMSPKLYVWAKDRPEIWEGEPPCLPPRDSL
NQSLSQDLTMAPGSTLWLSCGVPPDSVSRGPLSWTHVHPKGPKSLLSLELKDDRPARDMW
VMETGLLLPRATAQDAGKYYCHRGNLTMSFHLEITARPVLWHWLLRTGGWKGGGGSGGGG
SGGGGSGGGGSDILMTQSPSSMSVLSGDTVSITCHSSQDINSNIGWLQQRPGKSFKGLIY
HGTNLDDEVPSRFSGSGSGADYSLTISSLESEDFADYYCVQYAQFPWTFGGGTKLEIKRG
GGGSGGGGSGGGGSGGGGSMRVLILLWLFTAFPGVLSDVQLQESGPSLVKPSQSLSLTCT
VTGYSITSDFAWNWIRQFPGNKLEWMGYISYSGNTRYNPSLKSRISITRDTSKNQFFLQL
NSVTIEDTATYYCVTAGRGFPYWGQGTLVTVSAHHHHHH
SEQ ID NO. 68
MHLLGPWLLLLVLEYLAFSDSSKWVFEHPETLYAWEGACVWIPCTYRALDGDLESFILFH
NPEYNKNTSKFDGTRLYESTKDGKVPSEQDRVQFLGDKNKACTLSIHPVHLNDSGQLGLR
MESKTEKWMERIHLNVSERPFPPHIQLPPEIQESQEVTLTCLLNFSCYGYPIQLQWLLEG
VPMRQAAVTSTSLTIKSVFTRSELKFSPQWSHHGKIVTCQLQDADGKFLSNDTVQLNVKH
TPKLEIKVTPSDAIVREGDSVTMTCEVSSSNPEYTTVSWLKDGTSLKKQNTFTLNLREVT
KDQSGKYCCQVSNDVGPGRSEEVFLQVQYAPEGGGGSGGGGSGGGGSGGGGSDILMTQSP
SSMSVSLGDTVSITCHSSQDINSNIGWLQQRPGKSFKGLIYHGTNLDDEVPSRFSGSGSG
ADYSLTISSLESEDFADYYCVQYAQFPWTFGGGTKLEIKRGGGGSGGGGSGGGGSGGGGS
MRVLILLWLFTAFPGVLSDVQLQESGPSLVKPSQSLSLTCTVTGYSITSDFAWNWIRQFP
GNKLEWMGYISYSGNTRYNPSLKSRISITRDTSKNQFFLQLNSVTIEDTATYYCVTAGRG
FPYWGQGTLVTVSAHHHHHH
SEQ ID NO. 71
MLRLLLALNLFPSIQVTGDIQMTQTTSSLSASLGDRVTISCRASQDISKYLNWYQQKPDG
TVKLLIYHTSRLHSGVPSRFSGSGSGTDYSLTISNLEQEDIATYFCQQGNTLPYTFGGGT
KLEITGGGGSGGGGSGGGGSGGGGSEVKLQESGPGLVAPSQSLSVTCTVSGVSLPDYGVS
WIRQPPRKGLEWLGVIWGSETTYYNSALKSRLTIIKDNSKSQVFLKMNSLQTDDTAIYYC
AKHYYYGGSYAMDYWGQGTSVTVSSDYKDDDDKIEMNYPPPYLDNEKSNGTIIHVKGKHL
CPSPLFPGPSKPFWVLVVVGGVLACYSLLVTVAFIIFWVRSKRSRLLHSDYMNMTPRRPG
PTRKHYQPYAPPRDFAAYRSKRGRKKLLYIFKQPFMRPVQTTQEEDGCSCRFPEEEEGGC
ELRVKFSRSADAPAYQQGQNQLYNELNLGRREEYDVLDKRRGRDPEMGGKPQRRKNPQEG
LYNELQKDKMAEAYSEIGMKGERRRGKGHDGLYQGLSTATKDTYDALHMQALPPR
SEQ ID NO. 72
MLRLLLALNLFPSIQVTGDIQMTQTTSSLSASLGDRVTISCRASQDISKYLNWYQQKPDG
TVKLLIYHTSRLHSGVPSRFSGSGSGTDYSLTISNLEQEDIATYFCQQGNTLPYTFGGGT
KLEITGGGGSGGGGSGGGGSGGGGSEVKLQESGPGLVAPSQSLSVTCTVSGVSLPDYGVS
WIRQPPRKGLEWLGVIWGSETTYYNSALKSRLTIIKDNSKSQVFLKMNSLQTDDTAIYYC
AKHYYYGGSYAMDYWGQGTSVTVSSDYKDDDDKIEMNYPPPYLDNEKSNGTIIHVKGKHL
CPSPLFPGPSKPFWVLVVVGGVLACYSLLVTVAFIIFWVRSKRSRLLHSDYMNMTPRRPG
PTRKHYQPYAPPRDFAAYRSKRGRKKLLYIFKQPFMRPVQTTQEEDGCSCRFPEEEEGGC
ELRVKFSRSADAPAYQQGQNQLYNELNLGRREEYDVLDKRRGRDPEMGGKPQRRKNPQEG
LYNELQKDKMAEAYSEIGMKGERRRGKGHDGLYQGLSTATKDTYDALHMQALPPR
SEQ ID NO. 73
MPPPRLLFFLLFLTPMEVRPEEPLVVKVEEGDNAVLQCLKGTSDGPTQQLTWSRESPLKP
FLKLSLGLPGLGIHMRPLAIWLFIFNVSQQMGGFYLCQPGPPSEKAWQPGWTVNVEGSGE
LFRWNVSDLGGLGCGLKNRSSEGPSSPSGKLMSPKLYVWAKDRPEIWEGEPPCLPPRDSL
NQSLSQDLTMAPGSTLWLSCGVPPDSVSRGPLSWTHVHPKGPKSLLSLELKDDRPARDMW
VMETGLLLPRATAQDAGKYYCHRGNLTMSFHLEITARPGGGGSGGGGSGGGGSGGGGSEV
QLVESGGGLVQPGGSLRLSCAASGFNIKDTYIHWVRQAPGKGLEWVARIYPTNGYTRYAD
SVKGRFTISADTSKNTAYLQMNSLRAEDTAVYYCSRWGGDGFYAMDYWGQGTLVTVSSAS
TGGGGSGGGGSGGGGSDIQMTQSPSSLSASVGDRVTITCRASQDVNTAVAWYQQKPGKAP
KLLIYSADFLYSGVPSRFSGSRSGTDFTLTISSLQPEDFATYYCQQHYTTPPTFGQGTKV
EIKRTHHHHHH
SEQ ID NO. 74
MPPPRLLFFLLFLTPMEVRPEEPLVVKVEEGDNAVLQCLKGTSDGPTQQLTWSRESPLKP
FLKLSLGLPGLGIHMRPLAIWLFIFNVSQQMGGFYLCQPGPPSEKAWQPGWTVNVEGSGE
LFRWNVSDLGGLGCGLKNRSSEGPSSPSGKLMSPKLYVWAKDRPEIWEGEPPCLPPRDSL
NQSLSQDLTMAPGSTLWLSCGVPPDSVSRGPLSWTHVHPKGPKSLLSLELKDDRPARDMW
VMETGLLLPRATAQDAGKYYCHRGNLTMSFHLEITARPGGGGSGGGGSGGGGSGGGGSEV
QLVESGGGLVQPGGSLRLSCAASGFNIKDTYIHWVRQAPGKGLEWVARIYPTNGYTRYAD
SVKGRFTISADTSKNTAYLQMNSLRAEDTAVYYCSRWGGDGFYAMDYWGQGTLVTVSSAS
TGGGGSGGGGSGGGGSDIQMTQSPSSLSASVGDRVTITCRASQDVNTAVAWYQQKPGKAP
KLLIYSADFLYSGVPSRFSGSRSGTDFTLTISSLQPEDFATYYCQQHYTTPPTFGQGTKV
EIKRTHHHHHH
SEQ ID NO. 75
MPPPRLLFFLLFLTPMEVRPEEPLVVKVEEGDNAVLQCLKGTSDGPTQQLTWSRESPLKP
FLKLSLGLPGLGIHMRPLAIWLFIFNVSQQMGGFYLCQPGPPSEKAWQPGWTVNVEGSGE
LFRWNVSDLGGLGCGLKNRSSEGPSSPSGKLMSPKLYVWAKDRPEIWEGEPPCLPPRDSL
NQSLSQDLTMAPGSTLWLSCGVPPDSVSRGPLSWTHVHPKGPKSLLSLELKDDRPARDMW
VMETGLLLPRATAQDAGKYYCHRGNLTMSFHLEITARPGGGGSGGGGSGGGGSGGGGSEV
QLVESGGGLVQPGGSLRLSCAASGFNIKDTYIHWVRQAPGKGLEWVARIYPTNGYTRYAD
SVKGRFTISADTSKNTAYLQMNSLRAEDTAVYYCSRWGGDGFYAMDYWGQGTLVTVSSAS
TGGGGSGGGGSGGGGSDIQMTQSPSSLSASVGDRVTITCRASQDVNTAVAWYQQKPGKAP
KLLIYSASFLYSGVPSRFSGSRSGTDFTLTISSLQPEDFATYYCQQHYTTPPTFGQGTKV
EIKRTHHHHHH
SEQ ID NO. 76
MPPPRLLFFLLFLTPMEVRPEEPLVVKVEEGDNAVLQCLKGTSDGPTQQLTWSRESPLKP
FLKLSLGLPGLGIHMRPLAIWLFIFNVSQQMGGFYLCQPGPPSEKAWQPGWTVNVEGSGE
LFRWNVSDLGGLGCGLKNRSSEGPSSPSGKLMSPKLYVWAKDRPEIWEGEPPCLPPRDSL
NQSLSQDLTMAPGSTLWLSCGVPPDSVSRGPLSWTHVHPKGPKSLLSLELKDDRPARDMW
VMETGLLLPRATAQDAGKYYCHRGNLTMSFHLEITARPGGGGSGGGGSGGGGSGGGGSEV
QLVESGGGLVQPGGSLRLSCAASGFNIKDTYIHWVRQAPGKGLEWVARIYPTNGYTRYAD
SVKGRFTISADTSKNTAYLQMNSLRAEDTAVYYCSRWGGDGFYAMDYWGQGTLVTVSSAS
TGGGGSGGGGSGGGGSDIQMTQSPSSLSASVGDRVTITCRASQDVNTAVAWYQQKPGKAP
KLLIYSASFLYSGVPSRFSGSRSGTDFTLTISSLQPEDFATYYCQQHYTTPPTFGQGTKV
EIKRTHHHHHH
SEQ ID NO. 77
MPPPRLLFFLLFLTPMEVRPEEPLVVKVEEGDNAVLQCLKGTSDGPTQQLTWSRESPLKP
FLKLSLGLPGLGIHMRPLAIWLFIFNVSQQMGGFYLCQPGPPSEKAWQPGWTVNVEGSGE
LFRWNVSDLGGLGCGLKNRSSEGPSSPSGKLMSPKLYVWAKDRPEIWEGEPPCLPPRDSL
NQSLSQDLTMAPGSTLWLSCGVPPDSVSRGPLSWTHVHPKGPKSLLSLELKDDRPARDMW
VMETGLLLPRATAQDAGKYYCHRGNLTMSFHLEITARPGGGGSGGGGSGGGGSGGGGSEV
QLVESGGGLVQPGGSLRLSCAASGFNIKDTYIHWVRQAPGKGLEWVARIYPTNGYTRYAD
SVKGRFTISADTSKNTAYLQMNSLRAEDTAVYYCSRWGGDGFYAMDYWGQGTLVTVSSAS
TGGGGSGGGGSGGGGSDIQMTQSPSSLSASVGDRVTITCRASQDVNTAVAWYQQKPGKAP
KLLIYSASFLYSGVPSRFSGSRSGTDFTLTISSLQPEDFATYYCQQHYTTPPTFGQGTKV
EIKRTHHHHHH
SEQ ID NO. 78
MDFQVQIFSFLLISASVIMSRMAQVKLQESGAELVKPGASVKMSCKASGYTFTSYNMHWV
KQTPGQGLEWIGAIYPGNGDTSYNQKFKGKATLTADKSSSTAYMQLSSLTSEDSADYYCA
RSNYYGSSYWFFDVWGQGTTVTVSSGGGGSGGGGSGGGGSDIELTQSPTILSASPGEKVT
MTCRASSSVNYMDWYQKKPGSSPKPWIYATSNLASGVPARFSGSGSGTSYSLTISRVEAE
DAATYYCQQWSFNPPTFGGGTKLEIKRAAAGDPAEPKSPDKTHTCPPCPAPELLGGPSVF
LFPPKPKDTLMISRTPEVTCVVVDVSHEDPEVKFNWYVDGVEVHNAKTKPREEQYNSTYR
VVSVLTVLHQDWLNGKEYKCKVSNKALPAPIKETISKAKGQPREPQVYTLPPSREEMTKN
QVSLTCLVKGFYPSDIAVEWESNGQPENNYKTTPPVLDSDGSFFLYSKLTVDKSRWQQGN
VFSCSVMHEALHNHYTQKSLSLSPG
SEQ ID NO. 79
MDFQVQIFSFLLISASVIMSRMAQVKLQESGAELVKPGASVKMSCKASGYTFTSYNMHWV
KQTPGQGLEWIGAIYPGNGDTSYNQKFKGKATLTADKSSSTAYMQLSSLTSEDSADYYVA
RSNYYGSSYWFFDVWGQGTTVTVSSGGGGSGGGGSGGGGSDIELTQSPTILSASPGEKVT
MTCRASSSVNYMDWYQKKPGSSPKPWIYATSNLASGVPARFSGSGSGTSYSLTISRVEAE
DAATYYCQQWSFNPPTFGGGTKLEIKRAAAHHHHHH
SEQ ID NO. 80
MDFQVQIFSFLLISASVIMSRDIELTQSPTILSASPGEKVTMTCRASSSVNYMDWYQKKP
GSSPKPWIYATSNLASGVPARFSGSGSGTSYSLTISRVEAEDAATYYCQQWSFNPPTFGG
GTKLEIKRGGGGSGGGGSGGGGSMAQVKLQESGAELVKPGASVKMSCKASGYTFTSYNMH
WVKQTPGQGLEWIGAIYPGNGDTSYNQKFKGKATLTADKSSSTAYMQLSSLTSEDSADYY
CARSNYYGSSYWFFDVWGQGTTVTVSSAAAGDPAEPKSPDKTHTCPPCPAPELLGGPSVF
LFPPKPKDTLMISRTPEVTCVVVDVSHEDPEVKFNWYVDGVEVHNAKTKPREEQYNSTYR
VVSLVTVLHQDWLNGKEYKCKVSNKALPAPIEKTISKAKGQPREPQVYTLPPSREEMTKN
QVSLTCLVKGFYPSDIAVEWESNGQPENNKYTTPPVLDSDGSFFLYSKLTVDKSRWQQGN
VFSCSVMHEALHNHYTQKSLSLSPG
SEQ ID NO. 81
MDFQVQIFSFLLISASVIMSRDIELTQSPTILSASPGEKVTMTCRASSSVNYMDWYQKKP
GSSPKPWIYATSNLASGVPARFSGSGSGTSYSLTISRVEAEDAATYYCQQWSFNPPTFGG
GTKLEIKRGGGGSGGGGSGGGGSMAQVKLQESGAELVKPGASVKMSCKASGYTFTSYNMH
WVKQTPGQGLEWIGAIYPGNGDTSYNQKFKGKATLTADKSSSTAYMQLSSLTSEDSADYY
CARSNYYGSSYWFFDVWGQGTTVTVSSAAAHHHHHH
SEQ ID NO. 82
MPPPRLLFFLLFLTPMEVRPEEPLVVKVEEGDNAVLQCLKGTSDGPTQQLTWSRESPLKP
FLKLSLGLPGLGIHMRPLAIWLFIFNVSQQMGGFYLCQPGPPSEKAWQPGWTVNVEGSGE
LFRWNVSDLGGLGCGLKNRSSEGPSSPSGKLMSPKLYVWAKDRPEIWEGEPPCLPPRDSL
NQSLSQDLTMAPGSTLWLSCGVPPDSVSRGPLSWTHVHPKGPKSLLSLELKDDRPARDMW
VMETGLLLPRATAQDAGKYYCHRGNLTMSFHLEITARPGGGGSGGGGSGGGGSGGGGSMA
QVKLQESGAELVKPGASVKMSCKASGYTFTSYNMHWVKQTPGQGLEWIGAIYPGNGDTSY
NQKFKGKATLTADKSSSTAYMQLSSLTSEDSADYYCARSNYYGSSYWFFDVWGQGTTVTV
SSGGGGSGGGGSGGGGSDIELTQSPTILSASPGEKVTMTCRASSSVNYMDWYQKKPGSSP
KPWIYATSNLASGVPARFSGSGSGTSYSLTISRVEAEDAATYYCQQWSFNPPTFGGGTKL
EIKRAAAGDPAEPKSPDKTHTCPPCPAPELLGGPSVFLFPPKPKDTLMISRTPEVTCVVV
DVSHEDPEVKFNWYVDGVEVHNAKTKPREEQYNSTYRVVSVLTVLHQDWLNGKEYKCKVS
NKALPAPIEKTISKAKGQPREPQVYTLPPSREEMTKNQVSLTCLVKGFYPSDIAVEWESN
GQPENNYKTTPPVLDSDGSFFLYSKLTVDKSRWQQGNVFSCSVMHEALHNHYTQKSLSLS
PG
SEQ ID NO. 83
MPPPRLLFFLLFLTPMEVRPEEPLVVKVEEGDNAVLQCLKGTSDGPTQQLTWSRESPLKP
FLKLSLGLPGLGIHMRPLAIWLFIFNVSQQMGGFYLCQPGPPSEKAWQPGWTVNVEGSGE
LFRWNVSDLGGLGCGLKNRSSEGPSSPSGKLMSPKLYVWAKDRPEIWEGEPPCLPPRDSL
NQSLSQDLTMAPGSTLWLSCGVPPDSVSRGPLSWTHVHPKGPKSLLSLELKDDRPARDMW
VMETGLLLPRATAQDAGKYYCHRGNLTMSFHLEITARPGGGGSGGGGSGGGGSGGGGSMA
QVKLQESGAELVKPGASVKMSCKASGYTFTSYNMHWVKQTPGQGLEWIGAIYPGNGDTSY
NQKFKGKATLTADKSSSTAYMQLSSLTSEDSADYYCARSNYYGSSYWFFDVWGQGTTVTV
SSGGGGSGGGGSGGGGSDIELTQSPTILSASPGEKVTMTCRASSSVNYMDWYQKKPGSSP
KPWIYATSNLASGVPARFSGSGSGTSYSLTISRVEAEDAATYYCQQWSFNPPTFGGGTKL
EIKRAAAHHHHHH
SEQ ID NO. 84
MPPPRLLFFLLFLTPMEVRPEEPLVVKVEEGDNAVLQCLKGTSDGPTQQLTWSRESPLKP
FLKLSLGLPGLGIHMRPLAIWLFIFNVSQQMGGFYLCQPGPPSEKAWQPGWTVNVEGSGE
LFRWNVSDLGGLGCGLKNRSSEGPSSPSGKLMSPKLYVWAKDRPEIWEGEPPCLPPRDSL
NQSLSQDLTMAPGSTLWLSCGVPPDSVSRGPLSWTHVHPKGPKSLLSLELKDDRPARDMW
VMETGLLLPRATAQDAGKYYCHRGNLTMSFHLEITARPGGGGSGGGGSGGGGSGGGGSDI
ELTQSPTILSASPGEKVTMTCRASSSVNYMDWYQKKPGSSPKPWIYATSNLASGVPARFS
GSGSGTSYSLTISRVEAEDAATYYCQQWSFNPPTFGGGTKLEIKRGGGGSGGGGSGGGGS
MAQVKLQESGAELVKPGASVKMSCKASGYTFTSYNMHWVKQTPGQGLEWIGAIYPGNGDT
SYNQKFKGKATLTADKSSSTAYMQLSSLTSEDSADYYCARSNYYGSSYWFFDVWGQGTTV
TVSSAAAGDPAEPKSPDKTHTCPPCPAPELLGGPSVFLFPPKPKDTLMISRTPEVTCVVV
DVSHEDPEVKFNWYVDGVEVHNAKTKPREEQYNSTYRVVSVLTVLHQDWLNGKEYKCKVS
NKALPAPIEKTISKAKGQPREPQVYTLPPSREEMTKNQVSLTCLVKGFYPSDIAVEWESN
GQPENNYKTTPPVLDSDGSFFLYSKLTVDKSRWQQGNVFSCSVMHEALHNHYTQKSLSLS
PG
SEQ ID NO. 85
MPPPRLLFFLLFLTPMEVRPEEPLVVKVEEGDNAVLQCLKGTSDGPTQQLTWSRESPLKP
FLKLSLGLPGLGIHMRPLAIWLFIFNVSQQMGGFYLCQPGPPSEKAWQPGWTVNVEGSGE
LFRWNVSDLGGLGCGLKNRSSEGPSSPSGKLMSPKLYVWAKDRPEIWEGEPPCLPPRDSL
NQSLSQDLTMAPGSTLWLSCGVPPDSVSRGPLSWTHVHPKGPKSLLSLELKDDRPARDMW
VMETGLLLPRATAQDAGKYYCHRGNLTMSFHLEITARPGGGGSGGGGSGGGGSGGGGSDI
ELTQSPTILSASPGEKVTMTCRASSSVNYMDWYQKKPGSSPKPWIYATSNLASGVPARFS
GSGSGTSYSLTISRVEAEDAATYYCQQWSFNPPTFGGGTKLEIKRGGGGSGGGGSGGGGS
MAQVKLQESGAELVKPGASVKMSCKASGYTFTSYNMHWVKQTPGQGLEWIGAIYPGNGDT
SYNQKFKGKATLTADKSSSTAYMQLSSLTSEDSADYYCARSNYYGSSYWFFDVWGQGTTV
TVSSAAAHHHHHH
SEQ ID NO. 86
MPPPRLLFFLLFLTPMEVRPEEPLVVKVEEGDNAVLQCLKGTSDGPTQQLTWSRESPLKP
FLKLSLGLPGLGIHMRPLAIWLFIFNVSQQMGGFYLCQPGPPSEKAWQPGWTVNVEGSGE
LFRWNVSDLGGLGCGLKNRSSEGPSSPSGKLMSPKLYVWAKDRPEIWEGEPPCLPPRDSL
NQSLSQDLTMAPGSTLWLSCGVPPDSVSRGPLSWTHVHPKGPKSLLSLELKDDRPARDMW
VMETGLLLPRATAQDAGKYYCHRGNLTMSFHLEITARPGGGGSGGGGSGGGGSGGGGSQV
QLVQSGAEDKKPGESVKISCKASGYTFTNYGMNWVRQAPGQGLKWMGWINTYTGESTYAD
DFKGRFAFSLDTSASTAYLQLSSLRGEDTAVYFCARFAIKGDYWGQGTTVTVSSASTGGG
GSGGGGSGGGGSGGGGSDIVMTQSPLSLEVSPGEPASISCRSTKSLLHSDGITYLYWYLQ
KPGQSPQLLIYQLSNLASGVPDRFSSSGSGTDFTLKISRVEAEDEGTYYCAQNLEIPRTF
GQGTKLEIKRTHHHHHH
SEQ ID NO. 87
MPPPRLLFFLLFLTPMEVRPEEPLVVKVEEGDNAVLQCLKGTSDGPTQQLTWSRESPLKP
FLKLSLGLPGLGIHMRPLAIWLFIFNVSQQMGGFYLCQPGPPSEKAWQPGWTVNVEGSGE
LFRWNVSDLGGLGCGLKNRSSEGPSSPSGKLMSPKLYVWAKDRPEIWEGEPPCLPPRDSL
NQSLSQDLTMAPGSTLWLSCGVPPDSVSRGPLSWTHVHPKGPKSLLSLELKDDRPARDMW
VMETGLLLPRATAQDAGKYYCHRGNLTMSFHLEITARPGGGGSGGGGSGGGGSGGGGSQV
QLVQSGAEDVKPDASVKLSCKASGYTFTDYYMHWVRQAPGQGLEWMGRVNPNRPGTTYNQ
KFEGRVTMTTDTSTSTAYMQLSSLRGEDTAVYYCARANWLDYWGQGTTVTVSSASTGGGG
SGGGGSGGGGSGGGGSDIQMTQSPSSLEASVGDRVTITCSVSSSVSSIYLHWYQQKPGKS
PKLLIYSTSNLASGVPDRFSGSGSGTDFTLTISSLQAEDEGTYYCQVYSGYPLTFGGGTK
LEIKRTHHHHHH
SEQ ID NO. 88
MPPPRLLFFLLFLTPMEVRPEEPLVVKVEEGDNAVLQCLKGTSDGPTQQLTWSRESPLKP
FLKLSLGLPGLGIHMRPLAIWLFIFNVSQQMGGFYLCQPGPPSEKAWQPGWTVNVEGSGE
LFRWNVSDLGGLGCGLKNRSSEGPSSPSGKLMSPKLYVWAKDRPEIWEGEPPCLPPRDSL
NQSLSQDLTMAPGSTLWLSCGVPPDSVSRGPLSWTHVHPKGPKSLLSLELKDDRPARDMW
VMETGLLLPRATAQDAGKYYCHRGNLTMSFHLEITARPGGGGSGGGGSGGGGSGGGGSQV
QLQESGPGDVKPSETLSLTCTVSGGSVSSGDYYWTWIRQSPGKGLEWIGHIYYSGNTNYN
PSLKSRLTISIDTSKTTFSLQLSSVTGEDTAIYYCVRDRVTGAFDIWGQGTTVTVSSAST
GGGGSGGGGSGGGGSGGGGSDIQMTQSPSSLEASVGDRVTITCQASQDISNYLNWYQQKP
GKSPKLLIYDASNLETGVPDRFSGSGSGTDFTFTISSLQAEDEGTYFCQHFDHLPLAFGG
GTKLEIKRTHHHHHH
SEQ ID NO. 89
METDTLLLWVLLLWVPGSTGDIVLTQSPPSLAMSLGKRATISCRASESVTILGSHLIHWY
QQKPGQPPTLLIQLASNVQTGVPARFSGSGSRTDFTLTIDPVEEDDVAVYYCLQSRTIPR
TFGGGTKLEIKGSTSGSGKPGSGEGSTKGQIQLVQSGPELKKPGETVKISCKASGYTFTD
YSINWVKRAPGKGLKWMGWINTETREPAYAYDFRGRFAFSLETSASTAYLQINNLKYEDT
ATYFCALDYSYAMDYWGQGTSVTVSSGGGGSGGGGSGGGGSHHHHHH
SEQ ID NO. 90
MEFGLSWVFLVALFRGVQCQIQLVQSGPELKKPGETVKISCKASGYTFTDYSINWVKRAP
GKGLKWMGWINTETREPAYAYDFRGRFAFSLETSASTAYLQINNLKYEDTATYFCALDYS
YAMDYWGQGTSVTVSSGSTSGSGKPGSGEGSTKGDIVLTQSPPSLAMSLGKRATISCRAS
ESVTILGSHLIHWYQQKPGQPPTLLIQLASNVQTGVPARFSGSGSRTDFTLTIDPVEEDD
VAVYYCLQSRTIPRTFGGGTKLEIKGGGGSGGGGSGGGGSHHHHHH
SEQ ID NO. 91
MPPPRLLFFLLFLTPMEVRPEEPLVVKVEEGDNAVLQCLKGTSDGPTQQLTWSRESPLKP
FLKLSLGLPGLGIHMRPLAIWLFIFNVSQQMGGFYLCQPGPPSEKAWQPGWTVNVEGSGE
LFRWNVSDLGGLGCGLKNRSSEGPSSPSGKLMSPKLYVWAKDRPEIWEGEPPCLPPRDSL
NQSLSQDLTMAPGSTLWLSCGVPPDSVSRGPLSWTHVHPKGPKSLLSLELKDDRPARDMW
VMETGLLLPRATAQDAGKYYCHRGNLTMSFHLEITARPGGGGSGGGGSGGGGSGGGGSDI
VLTQSPPSLAMSLGKRATISCRASESVTILGSHLIHWYQQKPGQPPTLLIQLASNVQTGV
PARFSGSGSRTDFTLTIDPVEEDDVAVYYCLQSRTIPRTFGGGTKLEIKGSTSGSGKPGS
GEGSTKGQIQLVQSGPELKKPGETVKISCKASGYTFTDYSINWVKRAPGKGLKWMGWINT
ETREPAYAYDFRGRFAFSLETSASTAYLQINNLKYEDTATYFCALDYSYAMDYWGQGTSV
TVSSGGGGSGGGGSGGGGSHHHHHH
SEQ ID NO. 92
MPPPRLLFFLLFLTPMEVRPEEPLVVKVEEGDNAVLQCLKGTSDGPTQQLTWSRESPLKP
FLKLSLGLPGLGIHMRPLAIWLFIFNVSQQMGGFYLCQPGPPSEKAWQPGWTVNVEGSGE
LFRWNVSDLGGLGCGLKNRSSEGPSSPSGKLMSPKLYVWAKDRPEIWEGEPPCLPPRDSL
NQSLSQDLTMAPGSTLWLSCGVPPDSVSRGPLSWTHVHPKGPKSLLSLELKDDRPARDMW
VMETGLLLPRATAQDAGKYYCHRGNLTMSFHLEITARPGGGGSGGGGSGGGGSGGGGSQI
QLVQSPGELKKPGETVKISCKASGYTFTDYSINWVKRAPGKGLKWMGWINTETREPAYAY
DFRGRFAFSLETSASTAYLQINNLKYEDTATYFCALDYSYAMDYWGQGTSVTVSSGSTSG
SGKPGSGEGSTKGDIVLTQSPPSLAMSLGKRATISCRASESVTILGSHLIHWYQQKPGQP
PTLLIQLASNVQTGVPARFSGSGSRTDFTLTIDPVEEDDVAVYYCLQSRTIPRTFGGGTK
LEIKGGGGSGGGGSGGGGSHHHHHH
SEQ ID NO. 93
MPPPRLLFFLLFLTPMEVRPEEPLVVKVEEGDNAVLQCLKGTSDGPTQQLTWSRESPLKP
FLKLSLGLPGLGIHMRPLAIWLFIFNVSQQMGGFYLCQPGPPSEKAWQPGWTVNVEGSGE
LFRWNVSDLGGLGCGLKNRSSEGPSSPSGKLMSPKLYVWAKDRPEIWEGEPPCLPPRDSL
NQSLSQDLTMAPGSTLWLSCGVPPDSVSRGPLSWTHVHPKGPKSLLSLELKDDRPARDMW
VMETGLLLPRATAQDAGKYYCHRGNLTMSFHLEITARPDKTHTCPPCPAPELLGGPSVFL
FPPKPKDTLMISRTPEVTCVVVDVSHEDPEVKFNWYVDGVEVHNAKTKPREEQYNSTYRV
VSVLTVLHQDWLNGKEYKCKVSNKALPAPIEKTISKAKGQPREPQVYTLPPSREEMTKNQ
VSLTCLVKGFYPSDIAVEWESNGQPENNYKTTPPVLDSDGSFFLYSKLTVDKSRWQQGNV
FSCSVMHEALHNHYTQKSLSLSPGGGGGSGGGGSGGGGSGGGGSEVQLVESGGGLVQPGG
SLRLSCAASGFNIKDTYIHWVRQAPGKGLEWVARIYPTNGYTRYADSVKGRFTISADTSK
NTAYLQMNSLRAEDTAVYYCSRWGGDGFYAMDYWGQGTLVTVSSASTGGGGSGGGGSGGG
GSDIQMTQSPSSLSASVGDRVTITCRASQDVNTAVAWYQQKPGKAPKLLIYSASFLYSGV
PSRFSGSRSGTDFTLTISSLQPEDFATYYCQQHYTTPPTFGQGTKVEIKRT
SEQ ID NO. 94
MPPPRLLFFLLFLTPMEVRPEEPLVVKVEEGDNAVLQCLKGTSDGPTQQLTWSRESPLKP
FLKLSLGLPGLGIHMRPLAIWLFIFNVSQQMGGFYLCQPGPPSEKAWQPGWTVNVEGSGE
LFRWNVSDLGGLGCGLKNRSSEGPSSPSGKLMSPKLYVWAKDRPEIWEGEPPCLPPRDSL
NQSLSQDLTMAPGSTLWLSCGVPPDSVSRGPLSWTHVHPKGPKSLLSLELKDDRPARDMW
VMETGLLLPRATAQDAGKYYCHRGNLTMSFHLEITARPGGGGSGGGGSGGGGSGGGGSEV
QLVESGGGLVQPGGSLRLSCAASGFNIKDTYIHWVRQAPGKGLEWVARIYPTNGYTRYAD
SVKGRFTISADTSKNTAYLQMNSLRAEDTAVYYCSRWGGDGFYAMDYWGQGTLVTVSSAS
TGGGGSGGGGSGGGGSDIQMTQSPSSLSASVGDRVTITCRASQDVNTAVAWYQQKPGKAP
KLLIYSASFLYSGVPSRFSGSRSGTDFTLTISSLQPEDFATYYCQQHYTTPPTFGQGTKV
EIKRTGGGGSGGGGSGGGGSGGGGSQVQLQESGPGDVKPSETLSLTCTVSGGSVSSGDYY
WTWIRQSPGKGLEWIGHIYYSGNTNYNPSLKSRLTISIDTSKTTFSLQLSSVTGEDTAIY
YCVRDRVTGAFDIWGQGTTVTVSSASTGGGGSGGGGSGGGGSGGGGSDIQMTQSPSSLEA
SVGDRVTITCQASQDISNYLNWYQQKPGKSPKLLIYDASNLETGVPDRFSGSGSGTDFTF
TISSLQAEDEGTYFCQHFDHLPLAFGGGTKLEIKRTGGGGSHHHHHH
SEQ ID NO. 95
MPPPRLLFFLLFLTPMEVRPEEPLVVKVEEGDNAVLQCLKGTSDGPTQQLTWSRESPLKP
FLKLSLGLPGLGIHMRPLAIWLFIFNVSQQMGGFYLCQPGPPSEKAWQPGWTVNVEGSGE
LFRWNVSDLGGLGCGLKNRSSEGPSSPSGKLMSPKLYVWAKDRPEIWEGEPPCLPPRDSL
NQSLSQDLTMAPGSTLWLSCGVPPDSVSRGPLSWTHVHPKGPKSLLSLELKDDRPARDMW
VMETGLLLPRATAQDAGKYYCHRGNLTMSFHLEITARPGGGGSGGGGSGGGGSGGGGSEV
QLVESGGGLVQPGGSLRLSCAASGFNIKDTYIHWVRQAPGKGLEWVARIYPTNGYTRYAD
SVKGRFTISADTSKNTAYLQMNSLRAEDTAVYYCSRWGGDGFYAMDYWGQGTLVTVSSAS
TGGGGSGGGGSGGGGSDIQMTQSPSSLSASVGDRVTITCRASQDVNTAVAWYQQKPGKAP
KLLIYSASFLYSGVPSRFSGSRSGTDFTLTISSLQPEDFATYYCQQHYTTPPTFGQGTKV
EIKRTGGGGSGGGGSGGGGSGGGGSDIQMTQSPSSLEASVGDRVTITCQASQDISNYLNW
YQQKPGKSPKLLIYDASNLETGVPDRFSGSGSGTDFTFTISSLQAEDEGTYFCQHFDHLP
LAFGGGTKLEIKRTGGGGSGGGGSGGGGSGGGGSQVQLQESGPGDVKPSETLSLTCTVSG
GSVSSGDYYWTWIRQSPGKGLEWIGHIYYSGNTNYNPSLKSRLTISIDTSKTTFSLQLSS
VTGEDTAIYYCVRDRVTGAFDIWGQGTTVTVSSASTGGGGSHHHHHH
SEQ ID NO. 96
MEFGLSWVFLVALFRGVQCEVQLVESGGGLVQPGGSLRLSCAASGFNIKDTYIHWVRQAP
GKGLEWVARIYPTNGYTRYADSVKGRFTISADTSKNTAYLQMNSLRAEDTAVYYCSRWGG
DGFYAMDYWGQGTLVTVSSASTGGGGSGGGGSGGGGSDIQMTQSPSSLSASBGDRVTITC
RASQDVNTAVAQYQQKPGKAPKLLIYSASFLYSGVPSRFSGSRSGTDFTLTISSLQPEDF
ATYYCQQHYTTPPTFGQGTKVEIKRTGGGGSGGGGSGGGGSGGGGSQVQLQESGPGDVKP
SETLSLTCTVSGGSVSSGDYYWTWIRQSPGKGLEWIGHIYYSGNTNYSPSLKSRLTISID
TSKTTFSLQLSSVTGEDTAIYYCVRDRVTGAFDIWGQGTTVTVSSASTGGGGSGGGGSGG
GGSGGGGSDIQMTQSPSSLEASVGDRVTITCQASQDISNYLNWYQQKPGKSPKLLIYDAS
NLETGVPDRFSGSGSGTDFTFTISSLQAEDEGTYFCQHFDHLPLAFGGGTKLEIKRTGGG
GSHHHHHH
SEQ ID NO. 97
MEFGLSWVFLVALFRGVQCEVQLVESGGGLVQPGGSLRLSCAASGFNIKDTYIHWVRQAP
GKGLEWVARIYPTNGYTRYADSVKGRFTISADTSKNTAYLQMNSLRAEDTAVYYCSRWGG
DGFYAMDYWGQGTLVTVSSASTGGGGSGGGGSGGGGSDIQMTQSPSSLSASBGDRVTITC
RASQDVNTAVAQYQQKPGKAPKLLIYSASFLYSGVPSRFSGSRSGTDFTLTISSLQPEDF
ATYYCQQHYTTPPTFGQGTKVEIKRTGGGGSGGGGSGGGGSGGGGSDIQMTQSPSSLEAS
VGDRVTITCQASQDISNYLNWYQQKPGKSPKLLIYDASNLETGVPDRFSGSGSGTDFTFT
ISSLQAEDEGTYFCQHFDHLPLAFGGGTKLEIKRTGGGGSGGGGSGGGGSGGGGSQVQLQ
ESGPGDVKPSETLSLTCTVSGGSVSSGDYYWTWIRQSPGKGLEWIGHIYYSGNTNYNPSL
KSRLTISIDTSKTTFSLQLSSVTGEDTAIYYCVRDRVTGAFDIWGQGTTVTVSSASTGGG
GSHHHHHH
SEQ ID NO. 98
MPPPRLLFFLLFLTPMEVRPEEPLVVKVEEGDNAVLQCLKGTSDGPTQQLTWSRESPLKP
FLKLSLGLPGLGIHMRPLAIWLFIFNVSQQMGGFYLCQPGPPSEKAWQPGWTVNVEGSGE
LFRWNVSDLGGLGCGLKNRSSEGPSSPSGKLMSPKLYVWAKDRPEIWEGEPPCLPPRDSL
NQSLSQDLTMAPGSTLWLSCGVPPDSVSRGPLSWTHVHPKGPKSLLSLELKDDRPARDMW
VMETGLLLPRATAQDAGKYYCHRGNLTMSFHLEITARPGGGGSGGGGSGGGGSGGGGSEV
QLVESGGGLVQPGGSLRLSCAASGFNIKDTYIHWVRQAPGKGLEWVARIYPTNGYTRYAD
SVKGRFTISADTSKNTAYLQMNSLRAEDTAVYYCSRWGGDGFYAMDYWGQGTLVTVSSAS
TGGGGSGGGGSGGGGSDIQMTQSPSSLSASVGDRVTITCRASQDVNTAVAWYQQKPGKAP
KLLIYSASFLYSGVPSRFSGSRSGTDFTLTISSLQPEDFATYYCQQHYTTPPTFGQGTKV
EIKRTHHHHHH
SEQ ID NO. 99
MDFQVQIFSFLLISASVIMSRMAQVKLQESGAELVKPGASVKMSCKASGYTFTSYNMHWV
KQTPGQGLEWIGAIYPGNGDTSYNQKFKGKATLTADKSSSTAYMQLSSLTSEDSADYYCA
RSNYYGSSYWFFDVWGQGTTVTVSSGGGGSGGGGSGGGGSDIELTQSPTILSASPGEKVT
MTCRASSSVNYMDWYQKKPGSSPKPWIYATSNLASGVPARFSGSGSGTSYSLTISRVEAE
DAATYYCQQWSFNPPTFGGGTKLEIKRAAAGDPAEPKSPDKTHTCPPCPAPELLGGPSVF
LFPPKPKDTLMISRTPEVTCVVVDVSHEDPEVKFNWYVDGVEVHNAKTKPREEQYNSTYR
VVSVLTVLHQDWLNGKEYKCKVSNKALPAPIEKTISKAKGQPREPQVYTLPPSREEMTKN
QVSLTCLVKGFYPSDIAVEWESNGQPENNYKTTPPVLDSDGSFFLYSKLTVDKSRWQQGN
VFSCSVMHEALHNHYTQKSLSLSPG
SEQ ID NO. 100
MDFQVQIFSFLLISASVIMSRMAQVKLQESGAELVKPGASVKMSCKASGYTFTSYNMHWV
KQTPGQGLEWIGAIYPGNGDTSYNQKFKGKATLTADKSSSTAYMQLSSLTSEDSADYYCA
RSNYYGSSYWFFDVWGQGTTVTVSSGGGGSGGGGSGGGGSDIELTQSPTILSASPGEKVT
MTCRASSSVNYMDWYQKKPGSSPKPWIYATSNLASGVPARFSGSGSGTSYSLTISRVEAE
DAATYYCQQWSFNPPTFGGGTKLEIKRAAAHHHHHH
SEQ ID NO. 101
MDFQVQIFSFLLISASVIMSRDIELTQSPTILSASPGEKVTMTCRASSSVNYMDWYQKKP
GSSPKPWIYATSNLASGVPARFSGSGSGTSYSLTISRVEAEDAATYYCQQWSFNPPTFGG
GTKLEIKRGGGGSGGGGSGGGGSMAQVKLQESGAELVKPGASVKMSCKASGYTFTSYNMH
WVKQTPGQGLEWIGAIYPGNGDTSYNQKFKGKATLTADKSSSTAYMQLSSLTSEDSADYY
CARSNYYGSSYWFFDVWGQGTTVTVSSAAAGDPAEPKSPDKTHTCPPCPAPELLGGPSVF
LFPPKPKDTLMISRTPEVTCVVVDVSHEDPEVKFNWYNVGVEVHNAKTKPREEQYNSTYR
VVSVLTVLHQDWLNGKEYKCKVSNKALPAPIKETISKAKGQPREPQVYTLPPSREEMTKN
QVSLTCLVKGFYPSDIAVEWESNGQPENNYKTTPPVLDSDGSFFLYSKLTVDKSRWQQGN
VFSCSVMHEALHNHYTQKSLSLSPG
SEQ ID NO. 102
MDFQVQIFSFLLISASVIMSRDIELTQSPTILSASPGEKVTMTCRASSSVNYMDWYQKKP
GSSPKPWIYATSNLASGVPARFSGSGSGTSYSLTISRVEAEDAATYYCQQWSFNPPTFGG
GTKLEIKRGGGGSGGGGSGGGGSMAQVKLQESGAELVKPGASVKMSCKASGYTFTSYNMH
WVKQTPGQGLEWIGAIYPGNGDTSYNQKFKGKATLTADKSSSTAYMQLSSLTSEDSADYY
CARSNYYGSSYWFFDVWGQGTTVTVSSAAAHHHHHH
SEQ ID NO. 103
MEFGLSWVFLVALFRGVQCEVQLVESGGGLVQPGGSLRLSCAASGFNIKDTYIHWVRQAP
GKGLEWVARIYPTNGYTRYADSVKGRFTISADTSKNTAYLQMNSLRAEDTAVYYCSRWGG
DGFYAMDYWGQGTLVTVSSASTGGGGSGGGGSGGGGSDIQMTQSPSSLSASVGDRVTITC
RASQDVNTAVAWYQQKPGKAPKLLIYSASFLYSGVPSRFSGSRSGTDFTLTISSLQPEDF
ATYYCQQHYTTPPTFGQGTKVEIKRTDKTHTCPPCPAPELLGGPSVFLFPPKPKDTLMIS
RTPEVTCVVVDVSHEDPEVKFNWYVDGVEVHNAKTKPREEQYNSTYRVVSVLTVLHQDWL
NGKEYKCKVSNKALPAPIEKTISKAKGQPREPQVYTLPPSREEMTKNQVSLTCLVKGFYP
SDIAVEWESNGQPENNYKTTPPVLDSDGSFFLYSKLTVDKSRWQQGNVFSCSVMHEALHN
HYTQKSLSLSPG
SEQ ID NO. 104
MPPPRLLFFLLFLTPMEVRPEEPLVVKVEEGDNAVLQCLKGTSDGPTQQLTWSRESPLKP
FLKLSLGLPGLGIHMRPLAIWLFIFNVSQQMGGFYLCQPGPPSEKAWQPGWTVNVEGSGE
LFRWNVSDLGGLGCGLKNRSSEGPSSPSGKLMSPKLYVWAKDRPEIWEGEPPCLPPRDSL
NQSLSQDLTMAPGSTLWLSCGVPPDSVSRGPLSWTHVHPKGPKSLLSLELKDDRPARDMW
VMETGLLLPRATAQDAGKYYCHRGNLTMSFHLEITARPGGGGSGGGGSGGGGSGGGGSGG
GGSGGGGSGGGGSMAQVKLQESGAELVKPGASVKMSCKASGYTFTSYNMHWVKQTPGQGL
EWIGAIYPGNGDTSYNQKFKGKATLTADKSSSTAYMQLSSLTSEDSADYYCARSNYYGSS
YWFFDVWGQGTTVTVSSGGGGSGGGGSGGGGSDIELTQSPTILSASPGEKVTMTCRASSS
VNYMDWYQKKPGSSPKPWIYATSNLASGVPARFSGSGSGTSYSLTISRVEAEDAATYYCQ
QWSFNPPTFGGGTKLEIKRAAAGDPAEPKSPDKTHTCPPCPAPELLGGPSVFLFPPKPKD
TLMISRTPEVTCVVVDVSHEDPEVKFNWYVDGVEVHNAKTKPREEQYNSTYRVVSVLTVL
HQDWLNGKEYKCKVSNKALPAPIEKTISKAKGQPREPQVYTLPPSREEMTKNQVSLTCLV
KGFYPSDIAVEWESNGQPENNYKTTPPVLDSDGSFFLYSKLTVDKSRWQQGNVFSCSVMH
HEALHNHYTQKSLSLSGP
SEQ ID NO. 105
MPPPRLLFFLLFLTPMEVRPEEPLVVKVEEGDNAVLQCLKGTSDGPTQQLTWSRESPLKP
FLKLSLGLPGLGIHMRPLAIWLFIFNVSQQMGGFYLCQPGPPSEKAWQPGWTVNVEGSGE
LFRWNVSDLGGLGCGLKNRSSEGPSSPSGKLMSPKLYVWAKDRPEIWEGEPPCLPPRDSL
NQSLSQDLTMAPGSTLWLSCGVPPDSVSRGPLSWTHVHPKGPKSLLSLELKDDRPARDMW
VMETGLLLPRATAQDAGKYYCHRGNLTMSFHLEITARPGGGGSGGGGSGGGGSGGGGSGG
GGSGGGGSGGGGSMAQVKLQESGAELVKPGASVKMSCKASGYTFTSYNMHWVKQTPGQGL
EWIGAIYPGNGDTSYNQKFKGKATLTADKSSSTAYMQLSSLTSEDSADYYCARSNYYGSS
YWFFDVWGQGTTVTVSSGGGGSGGGGSGGGGSDIELTQSPTILSASPGEKVTMTCRASSS
VNYMDWYQKKPGSSPKPWIYATSNLASGVPARFSGSGSGTSYSLTISRVEAEDAATYYCQ
QWSFNPPTFGGGTKLEIKRAAAHHHHHH
SEQ ID NO. 106
MPPPRLLFFLLFLTPMEVRPEEPLVVKVEEGDNAVLQCLKGTSDGPTQQLTWSRESPLKP
FLKLSLGLPGLGIHMRPLAIWLFIFNVSQQMGGFYLCQPGPPSEKAWQPGWTVNVEGSGE
LFRWNVSDLGGLGCGLKNRSSEGPSSPSGKLMSPKLYVWAKDRPEIWEGEPPCLPPRDSL
NQSLSQDLTMAPGSTLWLSCGVPPDSVSRGPLSWTHVHPKGPKSLLSLELKDDRPARDMW
VMETGLLLPRATAQDAGKYYCHRGNLTMSFHLEITARPDPAEPKSPDKTHTCPPCPAPEL
LGGPSVFLFPPKPKDTLMISRTPEVTCVVVDVSHEDPEVKFNWYVDGVEVHNAKTKPREE
QYNSTYRVVSVLTVLHQDWLNGKEYKCKVSNKALPAPIEKTISKAKGQPREPQVYTLPPS
REEMTKNQVSLTCLVKGFYPSDIAVEWESNGQPENNYKTTPPVLDSDGSFFLYSKLTVDK
SRWQQGNVFSCSVMHEALHNHYTQKSLSLSPGGGGGSGGGGSGGGGSGGGGSMAQVKLQE
SGAELVKPGASVKMSCKASGYTFTSYNMHWVKQTPGQGLEWIGAIYPGNGDTSYNQKFKG
KATLTADKSSSTAYMQLSSLTSEDSADYYCARSNYYGSSYWFFDVWGQGTTVTVSSGGGG
SGGGGSGGGGSDIELTQSPTILSASPGEKVTVTCRASSSVNYMDWYQKKPGSSPKPWIYA
TSNLASGVPARFSGSGSGTSYSLTISRVEAEDAATYYCQQWSFNPPTFGGGTKLEIKRA
SEQ ID NO. 107
MDFQVQIFSFLLISASVIMSRMAQVKLQESGAELVKPGASVKMSCKASGYTFTSYNMHWV
KQTPGQGLEWIGAIYPGNGDTSYNQKFKGKATLTADKSSSTAYMQLSSLTSEDSADYYCA
RSNYYGSSYWFFDVWGQGTTVTVSSGGGGSGGGGSGGGGSDIELTQSPTILSASPGEKVT
MTCRASSSVNYMDWYQKKPGSSPKPWIYATSNLASGVPARFSGSGSGTSYSLTISRVEAE
DAATYYCQQWSFNPPTFGGGTKLEIKRAAAGGGGSGGGGSGGGGSGGGGSPEEPLVVKVE
EGDNAVLQCLKGTSDGPTQQLTWSRESPLKPFLKLSLGLPGLGIHMRPLAIWLFIFNVSQ
QMGGFYLCQPGPPSEKAWQPGWTVNVEGSGELFRWNVSDLGGLGCGLKNRSSEGPSSPSG
KLMSPKLYVWAKDRPEIWEGEPPCLPPRDSLNQSLSQDLTMAPGSTLWLSCGVPPDSVSR
GPLSWTHVHPKGPKSLLSLELKDDRPARDMWVMETGLLLPRATAQDAGKYYCHRGNLTMS
FHLEITARPDPAEPKSPDKTHTCPPCPAPELLGGPSVFLFPPKPKDTLMISRTPEVTCVV
VDVSHEDPEVKFNWYVDGVEVHNAKTKPREEQYNSTYRVVSVLTVLHQDWLNGKEYKCKV
SNKALPAPIEKTISKAKGQPREPQVYTLPPSREEMTKNQVSLTCLVKGFYPSDIAVEWES
NGQPENNYKTTPPVLDSDGSFFLYSKLTVDKSRWQQGNVFSCSVMHEALHNHYTQKSLSL
SPG
SEQ ID NO. 108
MLRLLLALNLFPSIQVTGDIQMTQTTSSLSASLGDRVTISCRASQDISKYLNWYQQKPDG
TVKLLIYHTSRLHSGVPSRFSGSGSGTDYSLTISNLEQEDIATYFCQQGNTLPYTFGGGT
KLEITGGGGSGGGGSGGGGSGGGGSEVKLQESGPGLVAPSQSLSVTCTVSGVSLPDYGVS
WIRQPPRKGLEWLGVIWGSETTYYNSALKSRLTIIKDNSKSQVFLKMNSLQTDDTAIYYC
AKHYYYGGSYAMDYWGQGTSVTVSSDYKDDDDKIEVMYPPPYLDNEKSNGTIIHVKGKHL
CPSPLFPGPSKPFWVLVVVGGVLACYSLLVTVAFIIFWVRSKRSRLLHSDYMNMTPRRPG
PTRKHYQPVAPPRDFAAYRSKRGRKKLLYIFKQPFMRPVQTTQEEDGCSCRFPEEEEGGC
ELRVKFSRSADAPAYQQGQNQLYNELNLGRREEYDVLDKRRGRDPEMGGKPQRRKNPQEG
LYNELQKDKMAEAYSEIGMKGERRRGKGHDGLYQGLSTATKDTYDALHMQALPPREGRGS
LLTCGDVEENPGPMPPPRLLFFLLFLTPMEVRPEEPLVVKVEEGDNAVLQCLKGTSDGPT
QQLTWSRESPLKPFLKLSLGLPGLGIHMRPLAIWLFIFNVSQQMGGFYLCQPGPPSEKAW
QPGWTVNVEGSGELFRWNVSDLGGLGCGLKNRSSEGPSSPSGKLMSPKLYVWAKDRPEIW
EGEPPCLPPRDSLNQSLSQDLTMAPGSTLWLSCGVPPDSVSRGPLSWTHVHPKGPKSLLS
LELKDDRPARDMWVMETGLLLPRATAQDAGKYYCHRGNLTMSFHLEITARPGGGGSGGGG
SGGGGSGGGGSEVQLVESGGGLVQPGGSLRLSCAASGFNIKDTYIHWVRQAPGKGLEWVA
RIYPTNGYTRYADSVKGRFTISADTSKNTAYLQMNSLRAEDTAVYYCSRWGGDGFYAMDY
WGQGTLVTVSSASTGGGGSGGGGSGGGGSDIQMTQSPSSLSASVGDRVTITCRASQDVNT
AVAWYQQKPGKAPKLLIYSASFLYSGVPSRFSGSRSGTDFTLTISSLQPEDFATYYCQQH
YTTPPTFGQGTKVEIKRTSRHHHHHH
SEQ ID NO. 109
MPPPRLLFFLLFLTPMEVRPEEPLVVKVEEGDNAVLQCLKGTSDGPTQQLTWSRESPLKP
FLKLSLGLPGLGIHMRPLAIWLFIFNVSQQMGGFYLCQPGPPSEKAWQPGWTVNVEGSGE
LFRWNVSDLGGLGCGLKNRSSEGPSSPSGKLMSPKLYVWAKDRPEIWEGEPPCLPPRDSL
NQSLSQDLTMAPGSTLWLSCGVPPDSVSRGPLSWTHVHPKGPKSLLSLELKDDRPARDMW
VMETGLLLPRATAQDAGKYYCHRGNLTMSFHLEITARPGGGGSGGGGSGGGGSGGGGSEV
QLVESGGGLVQPGGSLRLSCAASGFNIKDTYIHWVRQAPGKGLEWVARIYPTNGYTRYAD
SVKGRFTISADTSKNTAYLQMNSLRAEDTAVYYCSRWGGDGFYAMDYWGQGTLVTVSSAS
TGGGGSGGGGSGGGGSDIQMTQSPSSLSASVGDRVTITCRASQDVNTAVAWYQQKPGKAP
KLLIYSASFLYSGVPSRFSGSRSGTDFTLTISSLQPEDFATYYCQQHYTTPPTFGQGTKV
EIKRTSRHHHHHHEGRGSLLTCGDVEENPGPMLRLLLALNLFPSIQVTGDIQMTQTTSSL
SASLGDRVTISCRASQDISKYLNWYQQKPDGTVKLLIYHTSRLHSGVPSRFSGSGSGTDY
SLTISNLEQEDIATYFCQQGNTLPYTFGGGTKLEITGGGGSGGGGSGGGGSGGGGSEVKL
QESGPGLVAPSQSLSVTCTVSGVSLPDYGVSWIRQPPRKGLEWLGVIWGSETTYYNSALK
SRLTIIKDNSKSQVFLKMNSLQTDDTAIYYCAKHYYYGGSYAMDYWGQGTSVTVSSDYKD
DDDKIEVMYPPPYLDNEKSNGTIIHVKGKHLCPSPLFPGPSKPFWVLVVVGGVLACYSLL
VTVAFIIFWVRSKRSRLLHSDYMNMTPRRPGPTRKHYQPYAPPRDFAAYRSKRGRKKLLY
IFKQPFMRPVQTTQEEDGCSCRFPEEEEGGCELRVKFSRSADAPAYQQGQNQLYNELNLG
RREEYDVLDKRRGRDPEMGGKPQRRKNPQEGLYNELQKDKMAEAYSEIGMKGERRRGKGH
DGLYQGLSTATKDTYDALHMQALPPR
SEQ ID NO. 110
MPPPRLLFFLLFLTPMEVRPEEPLVVKVEEGDNAVLQCLKGTSDGPTQQLTWSRESPLKP
FLKLSLGLPGLGIHMRPLAIWLFIFNVSQQMGGFYLCQPGPPSEKAWQPGWTVNVEGSGE
LFRWNVSDLGGLGCGLKNRSSEGPSSPSGKLMSPKLYVWAKDRPEIWEGEPPCLPPRDSL
NQSLSQDLTMAPGSTLWLSCGVPPDSVSRGPLSWTHVHPKGPKSLLSLELKDDRPARDMW
VMETGLLLPRATAQDAGKYYCHRGNLTMSFHLEITARPGGGGSGGGGSGGGGSGGGGSEV
QLVESGGGLVQPGGSLRLSCAASGFNIKDTYIHWVRQAPGKGLEWVARIYPTNGYTRYAD
SVKGRFTISADTSKNTAYLQMNSLRAEDTAVYYCSRWGGDGFYAMDYWGQGTLVTVSSAS
TGGGGSGGGGSGGGGSDIQMTQSPSSLSASVGDRVTITCRASQDVNTAVAWYQQKPGKAP
KLLIYSASFLYSGVPSRFSGSRSGTDFTLTISSLQPEDFATYYCQQHYTTPPTFGQGTKV
EIKRTHHHHHH
SEQ ID NO. 111
MPPPRLLFFLLFLTPMEVRPEEPLVVKVEEGDNAVLQCLKGTSDGPTQQLTWSRESPLKP
FLKLSLGLPGLGIHMRPLAIWLFIFNVSQQMGGFYLCQPGPPSEKAWQPGWTVNVEGSGE
LFRWNVSDLGGLGCGLKNRSSEGPSSPSGKLMSPKLYVWAKDRPEIWEGEPPCLPPRDSL
NQSLSQDLTMAPGSTLWLSCGVPPDSVSRGPLSWTHVHPKGPKSLLSLELKDDRPARDMW
VMETGLLLPRATAQDAGKYYCHRGNLTMSFHLEITARPGGGGSGGGGSGGGGSGGGGSEV
QLVESGGGLVQPGGSLRLSCAASGFNIKDTYIHWVRQAPGKGLEWVARIYPTNGYTRYAD
SVKGRFTISADTSKNTAYLQMNSLRAEDTAVYYCSRWGGDGFYAMDYWGQGTLVTVSSAS
TGGGGSGGGGSGGGGSDIQMTQSPSSLSASVGDRVTITCRASQDVNTAVAWYQQKPGKAP
KLLIYSASFLYSGVPSRFSGSRSGTDFTLTISSLQPEDFATYYCQQHYTTPPTFGQGTKV
EIKRTHHHHHH
SEQ ID NO. 112
MPPPRLLFFLLFLTPMEVRPEEPLVVKVEEGDNAVLQCLKGTSDGPTQQLTWSRESPLKP
FLKLSLGLPGLGIHMRPLAIWLFIFNVSQQMGGFYLCQPGPPSEKAWQPGWTVNVEGSGE
LFRWNVSDLGGLGCGLKNRSSEGPSSPSGKLMSPKLYVWAKDRPEIWEGEPPCLPPRDSL
NQSLSQDLTMAPGSTLWLSCGVPPDSVSRGPLSWTHVHPKGPKSLLSLELKDDRPARDMW
VMETGLLLPRATAQDAGKYYCHRGNLTMSFHLEITARPVLWHWLLRTGGWK
SEQ ID NO. 113
MLRLLLALNLFPSIQVTGDIQMTQTTSSLSASLGDRVTISCRASQDISKYLNWYQQKPDG
TVKLLIYHTSRLHSGVPSRFSGSGSGTDYSLTISNLEQEDIATYFCQQGNTLPYTFGGGT
KLEITGGGGSGGGGSGGGGSGGGGSEVKLQESGPGLVAPSQSLSVTCTVSGVSLPDYGVS
WIRQPPRKGLEWLGVIWGSETTYYNSALKSRLTIIKDNSKSQVFLKMNSLQTDDTAIYYC
AKHYYYGGSYAMDYWGQGTSVTVSSDYKDDDDKIEVMYPPPYLDNEKSNGTIIHVKGKHL
CPSPLFPGPSKPFWVLVVVGGVLACYSLLVTVAFIIFWVRSKRSRLLHSDYMNMTPRRPG
PTRKHYQPVAPPRDFAAYRSKRGRKKLLYIFKQPFMRPVQTTQEEDGCSCRFPEEEEGGC
ELRVKFSRSADAPAYQQGQNQLYNELNLGRREEYDVLDKRRGRDPEMGGKPQRRKNPQEG
LYNELQKDKMAEAYSEIGMKGERRRGKGHDGLYQGLSTATKDTYDALHMQALPPR
SEQ ID NO. 114
MLRLLLALNLFPSIQVTGDIQMTQTTSSLSASLGDRVTISCRASQDISKYLNWYQQKPDG
TVKLLIYHTSRLHSGVPSRFSGSGSGTDYSLTISNLEQEDIATYFCQQGNTLPYTFGGGT
KLEITGGGGSGGGGSGGGGSGGGGSEVKLQESGPGLVAPSQSLSVTCTVSGVSLPDYGVS
WIRQPPRKGLEWLGVIWGSETTYYNSALKSRLTIIKDNSKSQVFLKMNSLQTDDTAIYYC
AKHYYYGGSYAMDYWGQGTSVTVSSIEVMYPPPYLDNEKSNGTIIHVKGKHLCPSPLFPG
PSKPFWVLVVVGGVLACYSLLVTVAFIIFWVRSKRSRLLHSDYMNMTPRRPGPTRKHYQP
YAPPRDFAAYRSKRGRKKLLYIFKQPFMRPVQTTQEEDGCSCRFPEEEEGGCELRVKFSR
SADAPAYQQGQNQLYNELNLGRREEYDVLDKRRGRDPEMGGKPQRRKNPQEGLYNELQKD
KMAEAYSEIGMKGERRRGKGHDGLYQGLSTATKDTYDALHMQALPPR
SEQ ID NO. 115
MEKDTLLLWVLLLWVPGSTGEVKLVESGGGLVQPGGSLKLSCAASGFDFSRYWMSWVRQA
PGKGLEWIGEINLDSSTINYTPSLKDKFIISRDNAKNTLYLQMSKVRSEDTALYYCARRY
DAMDYWGQGTSVTVSSAKTTAPSVYPLAPVCGDTTGSSVTLGCLVKGYFPEPVTLTWNSG
SLSSGVHTFPAVLQSDLYTLSSSVTVTSSTWPSQSITCNVAHPASSTKVDKKIEPRGPTI
KPCPPCKCPAPNLLGGPSVFIFPPKIKDMLMISLSPIVTCVVVDVSEDDPDVQISWFVNN
VEVHTAQTQTHREDYNSTLRVVSALPIQHQDWMSGKEFKCKVNNKDLPAPIERTISKPKG
SVRAPQVYVLPPPEEEMTKKQVTLTCMVTDFMPEDIYVEWTNNGKTELNYKNTEPVLDSD
GSYFMYSKLRVEKKNWVERNSYSCSVVHEGLHNHHTTKSFSRTPGK
SEQ ID NO. 116
MDFGLIFFIVALLKGVQCDIVLTQSPASLAVSLGQRATISCRASESVDDYGISFMNWFQQ
KPGQPPKLLIYAAPNQGSGVPARFSGSGSGTDFSLNIHPMEEDDTAMYFCQQSKDVRWTF
GGGTKLEIKRADAAPTVSIFPPSSEQLTSGGASVVCFLNNFYPKDINVKWKIDGSERQNG
VLNSWTDQDSKDSTYSMSSTLTLTKDEYERHNSYTCEATHKTSTSPIVKSFNRNEC
SEQ ID NO. 117
MEKDTLLLWVLLLWVPGSTGEVKLVESGGGLVQPGGSLKLSCAASGFDFSRYWMSWVRQA
PGKGLEWIGEINLDSSTINYTPSLKDKFIISRDNAKNTLYLQMSKVRSEDTALYYCARRY
DAMDYWGQGTSVTVSSASTGGGGSGGGGSGGGGSGGGGSDIVLTQSPASLAVSQGQRATI
SCRASESVDDYGISFMNWFQQKPGQPPKLLIYAAPNQGSGVPARFSGSGSGTDFSLNIHP
MEEDDTATYFCQQSKDVRWTFGGGTKLEIKRGGGGSGGGGSGGGGSGGGGSEVQLVESGG
GLVQPGGSLRLSCAASGFNIKDTYIHWVRQAPGKGLEWVARIYPTNGYTRYADSVKGRFT
ISADTSKNTAYLQMNSLRAEDTAVYYCSRWGGDGFYAMDYWGQGTLVTVSSASTGGGGSG
GGGSGGGGSDIQMTQSPSSLSASBGDRVTITCRASQDVNTAVAWYQQKPGKAPKLLIYSA
SFLYSGVPSRFSGSRSGTDFTLTISSLQPEDFATYYCQQHYTTPPTFGQGTKVEIKRTSR
GPHHHHHH
SEQ ID NO. 118
MDFGLIFFIVALLKGVQCDIVLTQSPASLAVSLGQRATISCRASESVDDYGISFMNWFQQ
KPGQPPKLLIYAAPNQGSGVPARFSGSGSGTDFSLNIHPMEEDDTAMYFCQQSKDVRWTF
GGGTKLEIKRGGGGSGGGGSGGGGSGGGGSEVKLVESGGGLVQPGGSLKLSCAASGFDFS
RYWMSWVRQAPGKGLEWIGEINLDSSTINYTPSLKDKFIISRDNAKNTLYLQMSKVRSED
TALYYCARRYDAMDYWGQGTSVTVSSGGGGSGGGGSGGGGSGGGGSEVQLVESGGGLVQP
GGSLRLSCAASGFNIKDTYIHWVRQAPGKGLEWVARIYPTNGYTRYADSVKGRFTISADT
SKNTAYLQMNSLRAEDTAVYYCSRWGGDGFYAMDYWGQGTLVTVSSASTGGGGSGGGGSG
GGGSDIQMTQSPSSLSASVGDRVTITCRASQDVNTAVAWYQQKPGKAPKLLIYSASFLYS
GVPSRFSGSRSGTDFTLTISSLQPEDFATYYCQQHYTTPPTFGQGTKVEIKRTSRGPHHH
HHH
Listing of Nucleotid Sequences
SEQID NO. 201
ATGGAGTTTGGGCTGAGCTGGGTTTTCCTCGTTGCTCTTTTTAGAGGTGTCCAGTGTCAGGTGCAGCTGCAGGAGTCG
GGCCCAGGACTGGTGAAGCCTTCGGAGACCCTGTCCCTCACCTGCACTGTCTCTGGTGGCTCCGTCAGCAGTGGTGAT
TACTACTGGACCTGGATCCGGCAGTCCCCAGGGAAGGGACTGGAGTGGATTGGACACATCTATTACAGTGGGAACACC
AATTATAACCCCTCCCTCAAGAGTCGACTCACCATATCAATTGACACGTCCAAGACTCAGTTCTCCCTGAAGCTGAGT
TCTGTGACCGCTGCGGACACGGCCATTTATTACTGTGTGCGAGATCGAGTGACTGGTGCTTTTGATATCTGGGGCCAA
GGGACAATGGTCACCGTCTCTTCAGCCTCCACCAAGGGCCCATCGGTCTTCCCCCTGGCGCCCTGCTCCAGGAGCACC
TCCGAGAGCACAGCGGCCCTGGGCTGCCTGGTCAAGGACTACTTCCCTGAACCGGTGACGGTGTCGTGGAACTCAGGC
GCTCTGACCAGCGGCGTGCACACCTTCCCGGCTGTCCTACAGTCCTCAGGACTCTACTCCCTCAGCAGCGTGGTGACC
GTGCCCTCCAGCAACTTCGGCACCCAGACCTACACCTGCAACGTAGATCACAAGCCCAGCAATACCAAGGTGGACAAG
ACAGTTGAGCGCAAATGTTGTGTCGAGTGCCCACCGTGCCCAGCACCACCTGTGGCAGGACCGTCAGTCTTCCTCTTC
CCCCCAAAACCCAAGGACACCCTCATGATCTCCCGGACCCCTGAGGTCACGTGCGTGGTGGTGGACGTGAGCCACGAA
GACCCCGAGGTCCAGTTCAACTGGTACGTGGACGGCGTGGAGGTGCATAATGCCAAGACAAAGCCACGGGAGGAGCAG
TTCCAAAGCACGTTCCGTGTGGTCAGCGTCCTCACCGTCGTGCACCAGGACTGGCTGAACGGCAAGGAGTACAAGTGC
AAGGTCTCCAACAAAGGCCTCCCAGCCCCCATCGAGAAAACCATCTCCAAAACCAAAGGGCAGCCCCGAGAACCACAG
GTGTACACCCTGCCCCCATCCCGGGAGGAGATGACCAAGAACCAGGTCAGCCTGACCTGCCTGGTCAAAGGCTTCTAC
CCCAGCGACATCGCCGTGGAGTGGGAGAGCAATGGGCAGCCGGAGAACAACTACAAGACCACGCCTCCCATGCTGGAC
TCCGACGGCTCCTTCTTCCTCTACAGCAAGCTCACCGTGGACAAGAGCAGGTGGCAGCAGGGGAACGTCTTCTCATGC
TCCGTGATGCATGAGGCTCTGCACAACCACTACACGCAGAAGAGCCTCTCCCTGTCTCCGGGT
SEQID NO. 202
ATGCCACCTCCTCGCCTCCTCTTCTTCCTCCTCTTCCTCACCCCCATGGAAGTCAGGCCCGAGGAACCTCTAGTGGTG
AAGGTGGAAGAGGGAGATAACGCTGTGCTGCAGTGCCTCAAGGGGACCTCAGATGGCCCCACTCAGCAGCTGACCTGG
TCTCGGGAGTCCCCGCTTAAACCCTTCTTAAAACTCAGCCTGGGGCTGCCAGGCCTGGGAATCCACATGAGGCCCCTG
GCCATCTGGCTTTTCATCTTCAACGTCTCTCAACAGATGGGGGGCTTCTACCTGTGCCAGCCGGGGCCCCCCTCTGAG
AAGGCCTGGCAGCCTGGCTGGACAGTCAATGTGGAGGGCAGCGGGGGAGGTGGGTCTGGAGGTGGAGGATCTGGTGGA
GGTGGGTCTGACATCCAGATGACCCAGTCTCCATCCTCCCTGTCTGCATCTGTAGGAGACAGAGTCACCATCACTTGC
CAGGCGAGTCAGGACATCAGCAACTATTTAAATTGGTATCAGCAGAAACCAGGGAAAGCCCCTAAACTCCTGATCTAC
GATGCATCCAATTTGGAAACAGGGGTCCCATCAAGGTTCAGTGGAAGTGGATCTGGGACAGATTTTACTTTCACCATC
AGCAGCCTGCAGCCTGAAGATATTGCAACATATTTCTGTCAACACTTTGATCATCTCCCGCTCGCTTTCGGCGGAGGG
ACCAAGGTGGAGATCAAACGAACTGTGGCTGCACCATCTGTCTTCATCTTCCCGCCATCTGATGAGCAGTTGAAATCT
GGAACTGCCTCTGTTGTGTGCCTGCTGAATAACTTCTATCCCAGAGAGGCCAAAGTACAGTGGAAGGTGGATAACGCC
CTCCAATCGGGTAACTCCCAGGAGAGTGTCACAGAGCAGGACAGCAAGGACAGCACCTACAGCCTCAGCAGCACCCTG
ACGCTGAGCAAAGCAGACTACGAGAAACACAAAGTCTACGCCTGCGAAGTCACCCATCAGGGCCTGAGCTCGCCCGTC
ACAAAGAGCTTCAACAGGGGAGAGTGT
SEQID NO. 203
ATGCCACCTCCTCGCCTCCTCTTCTTCCTCCTCTTCCTCACCCCCATGGAAGTCAGGCCCGAGGAACCTCTAGTGGTG
AAGGTGGAAGAGGGAGATAACGCTGTGCTGCAGTGCCTCAAGGGGACCTCAGATGGCCCCACTCAGCAGCTGACCTGG
TCTCGGGAGTCCCCGCTTAAACCCTTCTTAAAACTCAGCCTGGGGCTGCCAGGCCTGGGAATCCACATGAGGCCCCTG
GCCATCTGGCTTTTCATCTTCAACGTCTCTCAACAGATGGGGGGCTTCTACCTGTGCCAGCCGGGGCCCCCCTCTGAG
AAGGCCTGGCAGCCTGGCTGGACAGTCAATGTGGAGGGCAGCGGGGGAGGTGGGTCTGGAGGTGGAGGATCTGGTGGA
GGTGGGTCTCAGGTGCAGCTGCAGGAGTCGGGCCCAGGACTGGTGAAGCCTTCGGAGACCCTGTCCCTCACCTGCACT
GTCTCTGGTGGCTCCGTCAGCAGTGGTGATTACTACTGGACCTGGATCCGGCAGTCCCCAGGGAAGGGACTGGAGTGG
ATTGGACACATCTATTACAGTGGGAACACCAATTATAACCCCTCCCTCAAGAGTCGACTCACCATATCAATTGACACG
TCCAAGACTCAGTTCTCCCTGAAGCTGAGTTCTGTGACCGCTGCGGACACGGCCATTTATTACTGTGTGCGAGATCGA
GTGACTGGTGCTTTTGATATCTGGGGCCAAGGGACAATGGTCACCGTCTCTTCAGCCTCCACCAAGGGCCCATCGGTC
TTCCCCCTGGCGCCCTGCTCCAGGAGCACCTCCGAGAGCACAGCGGCCCTGGGCTGCCTGGTCAAGGACTACTTCCCT
GAACCGGTGACGGTGTCGTGGAACTCAGGCGCTCTGACCAGCGGCGTGCACACCTTCCCGGCTGTCCTACAGTCCTCA
GGACTCTACTCCCTCAGCAGCGTGGTGACCGTGCCCTCCAGCAACTTCGGCACCCAGACCTACACCTGCAACGTAGAT
CACAAGCCCAGCAATACCAAGGTGGACAAGACAGTTGAGCGCAAATGTTGTGTCGAGTGCCCACCGTGCCCAGCACCA
CCTGTGGCAGGACCGTCAGTCTTCCTCTTCCCCCCAAAACCCAAGGACACCCTCATGATCTCCCGGACCCCTGAGGTC
ACGTGCGTGGTGGTGGACGTGAGCCACGAAGACCCCGAGGTCCAGTTCAACTGGTACGTGGACGGCGTGGAGGTGCAT
AATGCCAAGACAAAGCCACGGGAGGAGCAGTTCCAAAGCACGTTCCGTGTGGTCAGCGTCCTCACCGTCGTGCACCAG
GACTGGCTGAACGGCAAGGAGTACAAGTGCAAGGTCTCCAACAAAGGCCTCCCAGCCCCCATCGAGAAAACCATCTCC
AAAACCAAAGGGCAGCCCCGAGAACCACAGGTGTACACCCTGCCCCCATCCCGGGAGGAGATGACCAAGAACCAGGTC
AGCCTGACCTGCCTGGTCAAAGGCTTCTACCCCAGCGACATCGCCGTGGAGTGGGAGAGCAATGGGCAGCCGGAGAAC
AACTACAAGACCACGCCTCCCATGCTGGACTCCGACGGCTCCTTCTTCCTCTACAGCAAGCTCACCGTGGACAAGAGC
AGGTGGCAGCAGGGGAACGTCTTCTCATGCTCCGTGATGCATGAGGCTCTGCACAACCACTACACGCAGAAGAGCCTC
TCCCTGTCTCCGGGT
SEQID NO. 204
ATGGAGACAGACACACTCCTGCTATGGGTACTGCTGCTCTGGGTTCCAGGTTCCACTGGTGACATCCAGATGACCCAG
TCTCCATCCTCCCTGTCTGCATCTGTAGGAGACAGAGTCACCATCACTTGCCAGGCGAGTCAGGACATCAGCAACTAT
TTAAATTGGTATCAGCAGAAACCAGGGAAAGCCCCTAAACTCCTGATCTACGATGCATCCAATTTGGAAACAGGGGTC
CCATCAAGGTTCAGTGGAAGTGGATCTGGGACAGATTTTACTTTCACCATCAGCAGCCTGCAGCCTGAAGATATTGCA
ACATATTTCTGTCAACACTTTGATCATCTCCCGCTCGCTTTCGGCGGAGGGACCAAGGTGGAGATCAAACGAACTGTG
GCTGCACCATCTGTCTTCATCTTCCCGCCATCTGATGAGCAGTTGAAATCTGGAACTGCCTCTGTTGTGTGCCTGCTG
AATAACTTCTATCCCAGAGAGGCCAAAGTACAGTGGAAGGTGGATAACGCCCTCCAATCGGGTAACTCCCAGGAGAGT
GTCACAGAGCAGGACAGCAAGGACAGCACCTACAGCCTCAGCAGCACCCTGACGCTGAGCAAAGCAGACTACGAGAAA
CACAAAGTCTACGCCTGCGAAGTCACCCATCAGGGCCTGAGCTCGCCCGTCACAAAGAGCTTCAACAGGGGAGAGTGT
SEQID NO. 205
ATGGAGACAGACACACTCCTGCTATGGGTACTGCTGCTCTGGGTTCCAGGTTCCACTGGTGACATCCAGATGACCCAG
TCTCCATCCTCCCTGTCTGCATCTGTAGGAGACAGAGTCACCATCACTTGCCAGGCGAGTCAGGACATCAGCAACTAT
TTAAATTGGTATCAGCAGAAACCAGGGAAAGCCCCTAAACTCCTGATCTACGATGCATCCAATTTGGAAACAGGGGTC
CCATCAAGGTTCAGTGGAAGTGGATCTGGGACAGATTTTACTTTCACCATCAGCAGCCTGCAGCCTGAAGATATTGCA
ACATATTTCTGTCAACACTTTGATCATCTCCCGCTCGCTTTCGGCGGAGGGACCAAGGTGGAGATCAAACGAACTGTG
GCTGCACCATCTGTCTTCATCTTCCCGCCATCTGATGAGCAGTTGAAATCTGGAACTGCCTCTGTTGTGTGCCTGCTG
AATAACTTCTATCCCAGAGAGGCCAAAGTACAGTGGAAGGTGGATAACGCCCTCCAATCGGGTAACTCCCAGGAGAGT
GTCACAGAGCAGGACAGCAAGGACAGCACCTACAGCCTCAGCAGCACCCTGACGCTGAGCAAAGCAGACTACGAGAAA
CACAAAGTCTACGCCTGCGAAGTCACCCATCAGGGCCTGAGCTCGCCCGTCACAAAGAGCTTCAACAGGGGAGAGTGT
GACAAAACTCACACATCGCCACCGTCCCCAGCACCTGAAGCCGCGGGGGGACCGTCAGAAGTCAGGCCCGAGGAACCT
CTAGTGGTGAAGGTGGAAGAGGGAGATAACGCTGTGCTGCAGTGCCTCAAGGGGACCTCAGATGGCCCCACTCAGCAG
CTGACCTGGTCTCGGGAGTCCCCGCTTAAACCCTTCTTAAAACTCAGCCTGGGGCTGCCAGGCCTGGGAATCCACATG
AGGCCCCTGGCCATCTGGCTTTTCATCTTCAACGTCTCTCAACAGATGGGGGGCTTCTACCTGTGCCAGCCGGGGCCC
CCCTCTGAGAAGGCCTGGCAGCCTGGCTGGACAGTCAATGTGGAGGGCAGCGGG
SEQID NO. 206
ATGGAGTTTGGGCTGAGCTGGGTTTTCCTCGTTGCTCTTTTTAGAGGTGTCCAGTGTCAGGTGCAGCTGCAGGAGTCG
GGCCCAGGACTGGTGAAGCCTTCGGAGACCCTGTCCCTCACCTGCACTGTCTCTGGTGGCTCCGTCAGCAGTGGTGAT
TACTACTGGACCTGGATCCGGCAGTCCCCAGGGAAGGGACTGGAGTGGATTGGACACATCTATTACAGTGGGAACACC
AATTATAACCCCTCCCTCAAGAGTCGACTCACCATATCAATTGACACGTCCAAGACTCAGTTCTCCCTGAAGCTGAGT
TCTGTGACCGCTGCGGACACGGCCATTTATTACTGTGTGCGAGATCGAGTGACTGGTGCTTTTGATATCTGGGGCCAA
GGGACAATGGTCACCGTCTCTTCAGCCTCCACCAAGGGCCCATCGGTCTTCCCCCTGGCGCCCTGCTCCAGGAGCACC
TCCGAGAGCACAGCGGCCCTGGGCTGCCTGGTCAAGGACTACTTCCCTGAACCGGTGACGGTGTCGTGGAACTCAGGC
GCTCTGACCAGCGGCGTGCACACCTTCCCGGCTGTCCTACAGTCCTCAGGACTCTACTCCCTCAGCAGCGTGGTGACC
GTGCCCTCCAGCAACTTCGGCACCCAGACCTACACCTGCAACGTAGATCACAAGCCCAGCAATACCAAGGTGGACAAG
ACAGTTGAGCGCAAATGTTGTGTCGAGTGCCCACCGTGCCCAGCACCACCTGTGGCAGGACCGTCAGTCTTCCTCTTC
CCCCCAAAACCCAAGGACACCCTCATGATCTCCCGGACCCCTGAGGTCACGTGCGTGGTGGTGGACGTGAGCCACGAA
GACCCCGAGGTCCAGTTCAACTGGTACGTGGACGGCGTGGAGGTGCATAATGCCAAGACAAAGCCACGGGAGGAGCAG
TTCCAAAGCACGTTCCGTGTGGTCAGCGTCCTCACCGTCGTGCACCAGGACTGGCTGAACGGCAAGGAGTACAAGTGC
AAGGTCTCCAACAAAGGCCTCCCAGCCCCCATCGAGAAAACCATCTCCAAAACCAAAGGGCAGCCCCGAGAACCACAG
GTGTACACCCTGCCCCCATCCCGGGAGGAGATGACCAAGAACCAGGTCAGCCTGACCTGCCTGGTCAAAGGCTTCTAC
CCCAGCGACATCGCCGTGGAGTGGGAGAGCAATGGGCAGCCGGAGAACAACTACAAGACCACGCCTCCCATGCTGGAC
TCCGACGGCTCCTTCTTCCTCTACAGCAAGCTCACCGTGGACAAGAGCAGGTGGCAGCAGGGGAACGTCTTCTCATGC
TCCGTGATGCATGAGGCTCTGCACAACCACTACACGCAGAAGAGCCTCTCCCTGTCTCCGGGTGGTGGAGGTGGGTCT
GGAGGTGGAGGATCTGGTGGAGGTGGGTCTGAAGTCAGGCCCGAGGAACCTCTAGTGGTGAAGGTGGAAGAGGGAGAT
AACGCTGTGCTGCAGTGCCTCAAGGGGACCTCAGATGGCCCCACTCAGCAGCTGACCTGGTCTCGGGAGTCCCCGCTT
AAACCCTTCTTAAAACTCAGCCTGGGGCTGCCAGGCCTGGGAATCCACATGAGGCCCCTGGCCATCTGGCTTTTCATC
TTCAACGTCTCTCAACAGATGGGGGGCTTCTACCTGTGCCAGCCGGGGCCCCCCTCTGAGAAGGCCTGGCAGCCTGGC
TGGACAGTCAATGTGGAGGGCAGCGGG
SEQID NO. 207
ATGGAGTTTGGGCTGAGCTGGGTTTTCCTCGTTGCTCTTTTTAGAGGTGTCCAGTGTCAGGTTCAGCTGGTGCAGTCT
GGTGCTGAGGTGAAGAAGCCTGGTGCCTCAGTGAAGGTCTCCTGCAAGGCTTCTGGTTACACATTCACTGACTACTAC
ATGCACTGGGTGCGTCAGGCCCCTGGTCAAGGTCTTGAGTGGATGGGTCGTGTTAATCCTAACCGGAGGGGTACTACC
TACAACCAGAAATTCGAGGGCCGTGTCACCATGACCACAGACACATCCACGAGCACAGCCTACATGGAGCTGCGTAGC
CTGCGTTCTGACGACACGGCCGTGTATTACTGTGCGCGTGCGAACTGGCTTGACTACTGGGGCCAGGGCACCACCGTC
ACCGTCTCCTCCGCCTCCACCAAGGGCCCATCGGTCTTCCCGCTAGCGCCCTGCTCCAGGAGCACCTCCGAGAGCACA
GCCGCCCTGGGCTGCCTGGTCAAGGACTACTTCCCCGAACCGGTGACGGTGTCGTGGAACTCAGGCGCCCTGACCAGC
GGCGTGCACACCTTCCCGGCTGTCCTACAGTCCTCAGGACTCTACTCCCTCAGCAGCGTGGTGACCGTGCCCTCCAGC
AGCTTGGGCACGAAGACCTACACCTGCAACGTAGATCACAAGCCCAGCAACACCAAGGTGGACAAGAGAGTTGAGTCC
AAATATGGTCCCCCATGCCCACCCTGCCCAGCACCTGAGGCCGCCGGGGGACCATCAGTCTTCCTGTTCCCCCCAAAA
CCCAAGGACACTCTCATGATCTCCCGGACCCCTGAGGTCACGTGCGTGGTGGTGGACGTGAGCCAGGAAGACCCCGAG
GTCCAGTTCAACTGGTACGTGGATGGCGTGGAGGTGCATAATGCCAAGACAAAGCCGCGGGAGGAGCAGTTCAACAGC
ACGTACCGTGTGGTCAGCGTCCTCACCGTCCTGCACCAGGACTGGCTGAACGGCAAGGAGTACAAGTGCAAGGTCTCC
AACAAAGGCCTCCCGTCCTCCATCGAGAAAACCATCTCCAAAGCCAAAGGGCAGCCCCGAGAGCCACAGGTGTACACC
CTGCCCCCATCCCAGGAGGAGATGACCAAGAACCAGGTCAGCCTGACCTGCCTGGTCAAAGGCTTCTACCCCAGCGAC
ATCGCCGTGGAGTGGGAAAGCAATGGGCAGCCGGAGAACAACTACAAGACCACGCCTCCCGTGCTGGACTCCGACGGC
TCCTTCTTCCTCTACAGCAGGCTAACCGTGGACAAGAGCAGGTGGCAGGAGGGGAATGTCTTCTCATGCTCCGTGATG
CATGAGGCTCTGCACAACCACTACACACAGAAGAGCCTCTCCCTGTCTCTGGGT
SEQID NO. 208
ATGCCACCTCCTCGCCTCCTCTTCTTCCTCCTCTTCCTCACCCCCATGGAAGTCAGGCCCGAGGAACCTCTAGTGGTG
AAGGTGGAAGAGGGAGATAACGCTGTGCTGCAGTGCCTCAAGGGGACCTCAGATGGCCCCACTCAGCAGCTGACCTGG
TCTCGGGAGTCCCCGCTTAAACCCTTCTTAAAACTCAGCCTGGGGCTGCCAGGCCTGGGAATCCACATGAGGCCCCTG
GCCATCTGGCTTTTCATCTTCAACGTCTCTCAACAGATGGGGGGCTTCTACCTGTGCCAGCCGGGGCCCCCCTCTGAG
AAGGCCTGGCAGCCTGGCTGGACAGTCAATGTGGAGGGCAGCGGGGGAGGTGGGTCTGGAGGTGGAGGATCTGGTGGA
GGTGGGTCTGACATCCAGATGACCCAGTCTCCATCCTCCCTGTCTGCATCTGTAGGAGACAGAGTCACCATCACTTGC
AGTGTCAGCTCAAGTGTATCCTCCATTTACTTGCACTGGTATCAGCAGAAACCAGGGAAAGCCCCTAAGCTCCTGATC
TATAGCACATCCAACTTGGCTTCTGGAGTCCCATCAAGGTTCAGTGGCAGTGGATCTGGGACAGATTTCACTCTCACC
ATCAGCAGTCTGCAACCTGAAGATTTTGCAACTTACTACTGTCAAGTCTACAGTGGTTACCCGCTCACGTTCGGCGGA
GGGACCAAGGTGGAGATCAAACGAACTGTGGCTGCACCATCTGTCTTCATCTTCCCGCCATCTGATGAGCAGTTGAAA
TCTGGAACTGCCTCTGTTGTGTGCCTGCTGAATAACTTCTATCCCAGAGAGGCCAAAGTACAGTGGAAGGTGGATAAC
GCCCTCCAATCGGGTAACTCCCAGGAGAGTGTCACAGAGCAGGACAGCAAGGACAGCACCTACAGCCTCAGCAGCACC
CTGACGCTGAGCAAAGCAGACTACGAGAAACACAAAGTCTACGCCTGCGAAGTCACCCATCAGGGCCTGAGCTCGCCC
GTCACAAAGAGCTTCAACAGGGGAGAGTGCTAATA
SEQID NO. 209
ATGCCACCTCCTCGCCTCCTCTTCTTCCTCCTCTTCCTCACCCCCATGGAAGTCAGGCCCGAGGAACCTCTAGTGGTG
AAGGTGGAAGAGGGAGATAACGCTGTGCTGCAGTGCCTCAAGGGGACCTCAGATGGCCCCACTCAGCAGCTGACCTGG
TCTCGGGAGTCCCCGCTTAAACCCTTCTTAAAACTCAGCCTGGGGCTGCCAGGCCTGGGAATCCACATGAGGCCCCTG
GCCATCTGGCTTTTCATCTTCAACGTCTCTCAACAGATGGGGGGCTTCTACCTGTGCCAGCCGGGGCCCCCCTCTGAG
AAGGCCTGGCAGCCTGGCTGGACAGTCAATGTGGAGGGCAGCGGGGGAGGTGGGTCTGGAGGTGGAGGATCTGGTGGA
GGTGGGTCTCAGGTTCAGCTGGTGCAGTCTGGTGCTGAGGTGAAGAAGCCTGGTGCCTCAGTGAAGGTCTCCTGCAAG
GCTTCTGGTTACACATTCACTGACTACTACATGCACTGGGTGCGTCAGGCCCCTGGTCAAGGTCTTGAGTGGATGGGT
CGTGTTAATCCTAACCGGAGGGGTACTACCTACAACCAGAAATTCGAGGGCCGTGTCACCATGACCACAGACACATCC
ACGAGCACAGCCTACATGGAGCTGCGTAGCCTGCGTTCTGACGACACGGCCGTGTATTACTGTGCGCGTGCGAACTGG
CTTGACTACTGGGGCCAGGGCACCACCGTCACCGTCTCCTCCGCCTCCACCAAGGGCCCATCGGTCTTCCCGCTAGCG
CCCTGCTCCAGGAGCACCTCCGAGAGCACAGCCGCCCTGGGCTGCCTGGTCAAGGACTACTTCCCCG
AACCGGTGACGGTGTCGTGGAACTCAGGCGCCCTGACCAGCGGCGTGCACACCTTCCCGGCTGTCCTACAGTCCTCAG
GACTCTACTCCCTCAGCAGCGTGGTGACCGTGCCCTCCAGCAGCTTGGGCACGAAGACCTACACCTGCAACGTAGATC
ACAAGCCCAGCAACACCAAGGTGGACAAGAGAGTTGAGTCCAAATATGGTCCCCCATGCCCACCCTGCCCAGCACCTG
AGGCCGCCGGGGGACCATCAGTCTTCCTGTTCCCCCCAAAACCCAAGGACACTCTCATGATCTCCCGGACCCCTGAGG
TCACGTGCGTGGTGGTGGACGTGAGCCAGGAAGACCCCGAGGTCCAGTTCAACTGGTACGTGGATGGCGTGGAGGTGC
ATAATGCCAAGACAAAGCCGCGGGAGGAGCAGTTCAACAGCACGTACCGTGTGGTCAGCGTCCTCACCGTCCTGCACC
AGGACTGGCTGAACGGCAAGGAGTACAAGTGCAAGGTCTCCAACAAAGGCCTCCCGTCCTCCATCGAGAAAACCATCT
CCAAAGCCAAAGGGCAGCCCCGAGAGCCACAGGTGTACACCCTGCCCCCATCCCAGGAGGAGATGACCAAGAACCAGG
TCAGCCTGACCTGCCTGGTCAAAGGCTTCTACCCCAGCGACATCGCCGTGGAGTGGGAAAGCAATGGGCAGCCGGAGA
ACAACTACAAGACCACGCCTCCCGTGCTGGACTCCGACGGCTCCTTCTTCCTCTACAGCAGGCTAACCGTGGACAAGA
GCAGGTGGCAGGAGGGGAATGTCTTCTCATGCTCCGTGATGCATGAGGCTCTGCACAACCACTACACACAGAAGAGCC
TCTCCCTGTCTCTG
SEQID NO. 210
ATGGAGACAGACACACTCCTGCTATGGGTACTGCTGCTCTGGGTTCCAGGTTCCACTGGTGACATCCAGATGACCCAG
TCTCCATCCTCCCTGTCTGCATCTGTAGGAGACAGAGTCACCATCACTTGCAGTGTCAGCTCAAGTGTATCCTCCATT
TACTTGCACTGGTATCAGCAGAAACCAGGGAAAGCCCCTAAGCTCCTGATCTATAGCACATCCAACTTGGCTTCTGGA
GTCCCATCAAGGTTCAGTGGCAGTGGATCTGGGACAGATTTCACTCTCACCATCAGCAGTCTGCAACCTGAAGATTTT
GCAACTTACTACTGTCAAGTCTACAGTGGTTACCCGCTCACGTTCGGCGGAGGGACCAAGGTGGAGATCAAACGAACT
GTGGCTGCACCATCTGTCTTCATCTTCCCGCCATCTGATGAGCAGTTGAAATCTGGAACTGCCTCTGTTGTGTGCCTG
CTGAATAACTTCTATCCCAGAGAGGCCAAAGTACAGTGGAAGGTGGATAACGCCCTCCAATCGGGTAACTCCCAGGAG
AGTGTCACAGAGCAGGACAGCAAGGACAGCACCTACAGCCTCAGCAGCACCCTGACGCTGAGCAAAGCAGACTACGAG
AAACACAAAGTCTACGCCTGCGAAGTCACCCATCAGGGCCTGAGCTCGCCCGTCACAAAGAGCTTCAACAGGGGAGAG
TGC
SEQID NO. 211
ATGGAGACAGACACACTCCTGCTATGGGTACTGCTGCTCTGGGTTCCAGGTTCCACTGGTGACATCCAGATGACCCAG
TCTCCATCCTCCCTGTCTGCATCTGTAGGAGACAGAGTCACCATCACTTGCAGTGTCAGCTCAAGTGTATCCTCCATT
TACTTGCACTGGTATCAGCAGAAACCAGGGAAAGCCCCTAAGCTCCTGATCTATAGCACATCCAACTTGGCTTCTGGA
GTCCCATCAAGGTTCAGTGGCAGTGGATCTGGGACAGATTTCACTCTCACCATCAGCAGTCTGCAACCTGAAGATTTT
GCAACTTACTACTGTCAAGTCTACAGTGGTTACCCGCTCACGTTCGGCGGAGGGACCAAGGTGGAGATCAAACGAACT
GTGGCTGCACCATCTGTCTTCATCTTCCCGCCATCTGATGAGCAGTTGAAATCTGGAACTGCCTCTGTTGTGTGCCTG
CTGAATAACTTCTATCCCAGAGAGGCCAAAGTACAGTGGAAGGTGGATAACGCCCTCCAATCGGGTAACTCCCAGGAG
AGTGTCACAGAGCAGGACAGCAAGGACAGCACCTACAGCCTCAGCAGCACCCTGACGCTGAGCAAAGCAGACTACGAG
AAACACAAAGTCTACGCCTGCGAAGTCACCCATCAGGGCCTGAGCTCGCCCGTCACAAAGAGCTTCAACAGGGGAGAG
TGCGACAAAACTCACACATCGCCACCGTCCCCAGCACCTGAAGCCGCGGGGGGACCGTCAGAAGTCAGGCCCGAGGAA
CCTCTAGTGGTGAAGGTGGAAGAGGGAGATAACGCTGTGCTGCAGTGCCTCAAGGGGACCTCAGATGGCCCCACTCAG
CAGCTGACCTGGTCTCGGGAGTCCCCGCTTAAACCCTTCTTAAAACTCAGCCTGGGGCTGCCAGGCCTGGGAATCCAC
ATGAGGCCCCTGGCCATCTGGCTTTTCATCTTCAACGTCTCTCAACAGATGGGGGGCTTCTACCTGTGCCAGCCGGGG
CCCCCCTCTGAGAAGGCCTGGCAGCCTGGCTGGACAGTCAATGTGGAGGGCAGCGGG
SEQID NO. 212
ATGGAGTTTGGGCTGAGCTGGGTTTTCCTCGTTGCTCTTTTTAGAGGTGTCCAGTGTCAGGTTCAGCTGGTGCAGTCT
GGTGCTGAGGTGAAGAAGCCTGGTGCCTCAGTGAAGGTCTCCTGCAAGGCTTCTGGTTACACATTCACTGACTACTAC
ATGCACTGGGTGCGTCAGGCCCCTGGTCAAGGTCTTGAGTGGATGGGTCGTGTTAATCCTAACCGGAGGGGTACTACC
TACAACCAGAAATTCGAGGGCCGTGTCACCATGACCACAGACACATCCACGAGCACAGCCTACATGGAGCTGCGTAGC
CTGCGTTCTGACGACACGGCCGTGTATTACTGTGCGCGTGCGAACTGGCTTGACTACTGGGGCCAGGGCACCACCGTC
ACCGTCTCCTCCGCCTCCACCAAGGGCCCATCGGTCTTCCCGCTAGCGCCCTGCTCCAGGAGCACCTCCGAGAGCACA
GCCGCCCTGGGCTGCCTGGTCAAGGACTACTTCCCCGAACCGGTGACGGTGTCGTGGAACTCAGGCGCCCTGACCAGC
GGCGTGCACACCTTCCCGGCTGTCCTACAGTCCTCAGGACTCTACTCCCTCAGCAGCGTGGTGACCGTGCCCTCCAGC
AGCTTGGGCACGAAGACCTACACCTGCAACGTAGATCACAAGCCCAGCAACACCAAGGTGGACAAGAGAGTTGAGTCC
AAATATGGTCCCCCATGCCCACCCTGCCCAGCACCTGAGGCCGCCGGGGGACCATCAGTCTTCCTGTTCCCCCCAAAA
CCCAAGGACACTCTCATGATCTCCCGGACCCCTGAGGTCACGTGCGTGGTGGTGGACGTGAGCCAGGAAGACCCCGAG
GTCCAGTTCAACTGGTACGTGGATGGCGTGGAGGTGCATAATGCCAAGACAAAGCCGCGGGAGGAGCAGTTCAACAGC
ACGTACCGTGTGGTCAGCGTCCTCACCGTCCTGCACCAGGACTGGCTGAACGGCAAGGAGTACAAGTGCAAGGTCTCC
AACAAAGGCCTCCCGTCCTCCATCGAGAAAACCATCTCCAAAGCCAAAGGGCAGCCCCGAGAGCCACAGGTGTACACC
CTGCCCCCATCCCAGGAGGAGATGACCAAGAACCAGGTCAGCCTGACCTGCCTGGTCAAAGGCTTCTACCCCAGCGAC
ATCGCCGTGGAGTGGGAAAGCAATGGGCAGCCGGAGAACAACTACAAGACCACGCCTCCCGTGCTGGACTCCGACGGC
TCCTTCTTCCTCTACAGCAGGCTAACCGTGGACAAGAGCAGGTGGCAGGAGGGGAATGTCTTCTCATGCTCCGTGATG
CATGAGGCTCTGCACAACCACTACACACAGAAGAGCCTCTCCCTGTCTCTGGGTGGTGGAGGTGGGTCTGGAGGTGGA
GGATCTGGTGGAGGTGGGTCTGAAGTCAGGCCCGAGGAACCTCTAGTGGTGAAGGTGGAAGAGGGAGATAACGCTGTG
CTGCAGTGCCTCAAGGGGACCTCAGATGGCCCCACTCAGCAGCTGACCTGGTCTCGGGAGTCCCCGCTTAAACCCTTC
TTAAAACTCAGCCTGGGGCTGCCAGGCCTGGGAATCCACATGAGGCCCCTGGCCATCTGGCTTTTCATCTTCAACGTC
TCTCAACAGATGGGGGGCTTCTACCTGTGCCAGCCGGGGCCCCCCTCTGAGAAGGCCTGGCAGCCTGGCTGGACAGTC
AATGTGGAGGGCAGCGGG
SEQID NO. 213
ATGGAGACAGACACACTCCTGCTATGGGTACTGCTGCTCTGGGTTCCAGGTTCCACTGGTGACATCCAGATGACACAG
ACTACATCCTCCCTGTCTGCCTCTCTGGGAGACAGAGTCACCATCAGTTGCAGGGCAAGTCAGGACATTAGTAAATAT
TTAAATTGGTATCAGCAGAAACCAGATGGAACTGTTAAACTCCTGATCTACCATACATCAAGATTACACTCAGGAGTC
CCATCAAGGTTCAGTGGCAGTGGGTCTGGAACAGATTATTCTCTCACCATTAGCAACCTGGAGCAAGAAGATATTGCC
ACTTACTTTTGCCAACAGGGTAATACGCTTCCGTACACGTTCGGAGGGGGGACTAAGTTGGAAATAACAGGAGGAGGT
GGGTCTGGAGGTGGAGGATCTGGTGGAGGTGGGTCTGGAGGAGGTGGGTCTGAGGTGAAACTGCAGGAGTCAGGACCT
GGCCTGGTGGCGCCCTCACAGAGCCTGTCCGTCACATGCACTGTCTCAGGGGTCTCATTACCCGACTATGGTGTAAGC
TGGATTCGCCAGCCTCCACGAAAGGGTCTGGAGTGGCTGGGAGTAATATGGGGTAGTGAAACCACATACTATAATTCA
GCTCTCAAATCCAGACTGACCATCATCAAGGACAACTCCAAGAGCCAAGTTTTCTTAAAAATGAACAGTCTGCAAACT
GATGACACAGCCATTTACTACTGTGCCAAACATTATTACTACGGTGGTAGCTATGCTATGGACTACTGGGGTCAAGGA
ACCTCAGTCACCGTCTCCTCACCGAGCCAGTTCCGGGTGTCGCCGCTGGATCGGACCTGGAACCTGGGCGAGACAGTG
GAGCTGAAGTGCCAGGTGCTGCTGTCCAACCCGACGTCGGGCTGCTCGTGGCTCTTCCAGCCGCGCGGCGCCGCCGCC
AGTCCCACCTTCCTCCTATACCTCTCCCAAAACAAGCCCAAGGCGGCCGAGGGGCTGGACACCCAGCGGTTCTCGGGC
AAGAGGTTGGGGGACACCTTCGTCCTCACCCTGAGCGACTTCCGCCGAGAGAACGAGGGCTACTATTTCTGCTCGGCC
CTGAGCAACTCCATCATGTACTTCAGCCACTTCGTGCCGGTCTTCCTGCCAGCGAAGCCCACCACGACGCCAGCGCCG
CGACCACCAACACCGGCGCCCACCATCGCGTCGCAGCCCCTGTCCCTGCGCCCAGAGGCGTGCCGGCCAGCGGCGGGG
GGCGCAGTGCACACGAGGGGGCTGGACTTCGCCTGTGATATCTACATCTGGGCGCCCTTGGCCGGGACTTGTGGGGTC
CTTCTCCTGTCACTGGTTATCACCAGGAGTAAGAGGAGCAGGCTCCTGCACAGTGACTACATGAACATGACTCCCCGC
CGCCCCGGGCCCACCCGCAAGCATTACCAGCCCTATGCCCCACCACGCGACTTCGCAGCCTATCGCTCCAAACGGGGC
AGAAAGAAACTCCTGTATATATTCAAACAACCATTTATGAGACCAGTACAAACTACTCAAGAGGAAGATGGCTGTAGC
TGCCGATTTCCAGAAGAAGAAGAAGGAGGATGTGAACTGAGAGTGAAGTTCAGCAGGAGCGCAGACGCCCCCGCGTAC
CAGCAGGGCCAGAACCAGCTCTATAACGAGCTCAATCTAGGACGAAGAGAGGAGTACGATGTTTTGGACAAGAGACGT
GGCCGGGACCCTGAGATGGGGGGAAAGCCGCAGAGAAGGAAGAACCCTCAGGAAGGCCTGTACAATGAACTGCAGAAA
GATAAGATGGCGGAGGCCTACAGTGAGATTGGGATGAAAGGCGAGCGCCGGAGGGGCAAGGGGCACGATGGCCTTTAC
CAGGGTCTCAGTACAGCCACCAAGGACACCTACGACGCCCTTCACATGCAGGCCCTGCCCCCTCGC
SEQID NO. 214
ATGCCACCTCCTCGCCTCCTCTTCTTCCTCCTCTTCCTCACCCCCATGGAAGTCAGGCCCGAGGAACCTCTAGTGGTG
AAGGTGGAAGAGGGAGATAACGCTGTGCTGCAGTGCCTCAAGGGGACCTCAGATGGCCCCACTCAGCAGCTGACCTGG
TCTCGGGAGTCCCCGCTTAAACCCTTCTTAAAACTCAGCCTGGGGCTGCCAGGCCTGGGAATCCACATGAGGCCCCTG
GCCATCTGGCTTTTCATCTTCAACGTCTCTCAACAGATGGGGGGCTTCTACCTGTGCCAGCCGGGGCCCCCCTCTGAG
AAGGCCTGGCAGCCTGGCTGGACAGTCAATGTGGAGGGCAGCGGGCATCATCACCATCACCAT
SEQID NO. 215
ATGCCACCTCCTCGCCTCCTCTTCTTCCTCCTCTTCCTCACCCCCATGGAAGTCAGGCCCGAGGAACCTCTAGTGGTG
AAGGTGGAAGAGGGAGATAACGCTGTGCTGCAGTGCCTCAAGGGGACCTCAGATGGCCCCACTCAGCAGCTGACCTGG
TCTCGGGAGTCCCCGCTTAAACCCTTCTTAAAACTCAGCCTGGGGCTGCCAGGCCTGGGAATCCACATGAGGCCCCTG
GCCATCTGGCTTTTCATCTTCAACGTCTCTCAACAGATGGGGGGCTTCTACCTGTGCCAGCCGGGGCCCCCCTCTGAG
AAGGCCTGGCAGCCTGGCTGGACAGTCAATGTGGAGGGCAGCGGGGACAAAACTCACACATGCCCACCGTGCCCAGCA
CCTGAACTCCTGGGGGGACCGTCAGTCTTCCTCTTCCCCCCAAAACCCAAGGACACCCTCATGATCTCCCGGACCCCT
GAGGTCACATGCGTGGTGGTGGACGTGAGCCACGAAGACCCTGAGGTCAAGTTCAACTGGTACGTGGACGGCGTGGAG
GTGCATAATGCCAAGACAAAGCCGCGGGAGGAGCAGTACAACAGCACGTACCGTGTGGTCAGCGTCCTCACCGTCCTG
CACCAGGACTGGCTGAATGGCAAGGAGTACAAGTGCAAGGTCTCCAACAAAGCCCTCCCAGCCCCCATCGAGAAAACC
ATCTCCAAAGCCAAAGGGCAGCCCCGAGAACCACAGGTGTACACCCTGCCCCCATCCCGGGAGGAGATGACCAAGAAC
CAGGTCAGCCTGACCTGCCTGGTCAAAGGCTTCTATCCCAGCGACATCGCCGTGGAGTGGGAGAGCAATGGGCAGCCG
GAGAACAACTACAAGACCACGCCTCCCGTGCTGGACTCCGACGGCTCCTTCTTCCTCTACAGCAAGCTCACCGTGGAC
AAGAGCAGGTGGCAGCAGGGGAACGTCTTCTCATGCTCCGTGATGCACGAGGCTCTGCACAACCACTACACGCAGAAG
AGCCTCTCCCTGTCTCCGGGT
SEQID NO. 216
ATGGAGTTTGGGCTGAGCTGGGTTTTCCTCGTTGCTCTTTTTAGAGGTGTCCAGTGTGAGGTGCAGCTGGTGGAGTCT
GGTGGTGGTCTTGTTCAACCTGGTGGTTCTCTTCGTCTTTCTTGTGCTGCTTCTGGTTTTAATATTAAAGATACTTAT
ATTCATTGGGTTCGTCAAGCTCCTGGTAAAGGTCTTGAATGGGTTGCTCGTATTTATCCTACTAATGGTTATACTCGT
TATGCTGATTCTGTTAAAGGTCGTTTTACTATTTCTGCTGATACTTCTAAAAATACTGCTTATCTTCAAATGAACTCT
CTTCGTGCTGAAGATACTGCTGTTTATTATTGTTCTCGTTGGGGTGGTGATGGTTTTTATGCTATGGATTATTGGGGT
CAAGGTACTCTTGTCACCGTCTCCTCAGCTAGCACCGGGGGAGGTGGGTCTGGAGGTGGAGGATCTGGTGGAGGTGGG
TCTGACATCCAGATGACCCAGTCTCCTTCTTCTCTTTCTGCTTCTGTTGGTGATCGTGTTACTATTACTTGTCGTGCT
TCTCAAGATGTTAATACTGCTGTTGCTTGGTATCAACAAAAACCTGGTAAAGCTCCTAAACTTCTTATTTATTCTGCT
TCTTTTCTTTATTCTGGTGTTCCTTCTCGTTTTTCTGGTTCTCGTTCTGGTACTGATTTTACTCTTACTATTTCTTCT
CTTCAACCTGAAGATTTTGCTACTTATTATTGTCAACAACATTATACTACTCCTCCTACTTTTGGTCAAGGTACCAAG
GTGGAGATCAAACGTACGGGGCCCCATCATCACCATCACCAT
SEQID NO. 217
ATGGAGTTTGGGCTGAGCTGGGTTTTCCTCGTTGCTCTTTTTAGAGGTGTCCAGTGTCAGGTGCAGCTGGTGCAGAGC
GGCGCCGAGGACAAGAAGCCCGGCGAGAGCGTGAAGATCAGCTGCAAGGCCAGCGGCTACACCTTCACCAACTACGGC
ATGAACTGGGTGAGGCAGGCCCCCGGCCAGGGCCTGAAGTGGATGGGCTGGATCAACACCTACACCGGCGAGAGCACC
TACGCCGACGACTTCAAGGGCAGGTTCGCCTTCAGCCTGGACACCAGCGCCAGCACCGCCTACCTGCAGCTGAGCAGC
CTGAGGGGCGAGGACACCGCCGTGTACTTCTGCGCCAGGTTCGCCATCAAGGGCGACTACTGGGGCCAGGGCACCACC
GTGACCGTGAGCAGCGCCAGCACCGGCGGCGGCGGCAGCGGCGGCGGCGGCAGCGGCGGCGGCGGCAGCGGCGGCGGC
GGCAGCGACATCGTGATGACCCAGAGCCCCCTGAGCCTGGAGGTGAGCCCCGGCGAGCCCGCCAGCATCAGCTGCAGG
AGCACCAAGAGCCTGCTGCACAGCGACGGCATCACCTACCTGTACTGGTACCTGCAGAAGCCCGGCCAGAGCCCCCAG
CTGCTGATCTACCAGCTGAGCAACCTGGCCAGCGGCGTGCCCGACAGGTTCAGCAGCAGCGGCAGCGGCACCGACTTC
ACCCTGAAGATCAGCAGGGTGGAGGCCGAGGACGAGGGCACCTACTACTGCGCCCAGAACCTGGAGATCCCCAGGACC
TTCGGCCAGGGCACCAAGCTGGAGATCAAGAGGACCGGGCCCCATCATCACCATCACCAT
SEQID NO. 218
ATGGAGACAGACACACTCCTGCTATGGGTACTGCTGCTCTGGGTTCCAGGTTCCACTGGTGACATCGTGATGACCCAG
AGCCCCCTGAGCCTGCCCGTGACCCCCGGCGAGCCCGCCAGCATCAGCTGCAGGAGCACCAAGAGCCTGCTGCACAGC
GACGGCATCACCTACCTGTACTGGTACCTGCAGAAGCCCGGCCAGAGCCCCCAGCTGCTGATCTACCAGCTGAGCAAC
CTGGCCAGCGGCGTGCCCGACAGGTTCAGCAGCAGCGGCAGCGGCACCGACTTCACCCTGAAGATCAGCAGGGTGGAG
GCCGAGGACGAGGGCGTGTACTACTGCGCCCAGAACCTGGAGATCCCCAGGACCTTCGGCTGCGGCACCAAGCTGGAG
ATCAAGAGGACCGGCGGCGGCGGCAGCGGCGGCGGCGGCAGCGGCGGCGGCGGCAGCGGCGGCGGCGGCAGCCAGGTG
CAGCTGGTGCAGAGCGGCGCCGAGGTGAAGAAGCCCGGCGAGAGCGTGAAGATCAGCTGCAAGGCCAGCGGCTACACC
TTCACCAACTACGGCATGAACTGGGTGAGGCAGGCCCCCGGCCAGTGCCTGAAGTGGATGGGCTGGATCAACACCTAC
ACCGGCGAGAGCACCTACGCCGACGACTTCAAGGGCAGGTTCGCCTTCAGCCTGGACACCAGCGCCAGCACCGCCTAC
CTGCAGCTGAGCAGCCTGAGGAGCGAGGACACCGCCGTGTACTTCTGCGCCAGGTTCGCCATCAAGGGCGACTACTGG
GGCCAGGGCACCCTGGTGACCGTGAGCAGCGGGCCCCATCATCACCATCACCAT
SEQID NO. 219
ATGGAGTTTGGGCTGAGCTGGGTTTTCCTCGTTGCTCTTTTTAGAGGTGTCCAGTGTCAGGTTCAGCTGGTGCAGTCT
GGTGCTGAGGATGTGAAGCCTGATGCCTCAGTGAAGCTCTCCTGCAAGGCTTCTGGTTACACATTCACTGACTACTAC
ATGCACTGGGTGCGTCAGGCCCCTGGTCAAGGTCTTGAGTGGATGGGTCGTGTTAATCCTAACCGGAGGGGTACTACC
TACAACCAGAAATTCGAGGGCCGTGTCACCATGACCACAGACACATCCACGAGCACAGCCTACATGCAGCTGAGTAGC
CTGCGTGGTGAAGACACGGCCGTGTATTACTGTGCGCGTGCGAACTGGCTTGACTACTGGGGCCAGGGCACCACCGTC
ACCGTCTCCTCCGCCTCCACCGGGGGAGGTGGGTCTGGAGGTGGAGGATCTGGTGGAGGTGGGTCTGGTGGAGGTGGG
TCTGACATCCAGATGACCCAGTCTCCATCCTCCCTGGAGGCATCTGTAGGAGACAGAGTCACCATCACTTGCAGTGTC
AGCTCAAGTGTATCCTCCATTTACTTGCACTGGTATCAGCAGAAACCAGGGAAAAGCCCTAAGCTCCTGATCTATAGC
ACATCCAACTTGGCTTCTGGAGTCCCAGATAGGTTCAGTGGCAGTGGATCTGGGACAGATTTCACTCTCACCATCAGC
AGTCTGCAAGCCGAAGATGAGGGCACTTACTACTGTCAAGTCTACAGTGGTTACCCGCTCACGTTCGGCGGAGGGACC
AAGCTGGAGATCAAACGAACTGGGCCCCATCATCACCATCACCAT
SEQID NO. 220
ATGGAGACAGACACACTCCTGCTATGGGTACTGCTGCTCTGGGTTCCAGGTTCCACTGGTGACATCCAGATGACCCAG
TCTCCATCCTCCCTGTCTGCATCTGTAGGAGACAGAGTCACCATCACTTGCAGTGTCAGCTCAAGTGTATCCTCCATT
TACTTGCACTGGTATCAGCAGAAACCAGGGAAAGCCCCTAAGCTCCTGATCTATAGCACATCCAACTTGGCTTCTGGA
GTCCCATCAAGGTTCAGTGGCAGTGGATCTGGGACAGATTTCACTCTCACCATCAGCAGTCTGCAACCTGAAGATGAA
GCAACTTACTACTGTCAAGTCTACAGTGGTTACCCGCTCACGTTCGGCTGCGGGACCAAGGTGGAGATCAAACGAACT
GGGGGAGGTGGGTCTGGAGGTGGAGGATCTGGTGGAGGTGGGTCTGGTGGAGGTGGGTCTCAGGTTCAGCTGGTGCAG
TCTGGTGCTGAGGATAAGAAGCCTGGTGCCTCAGTGAAGGTCTCCTGCAAGGCTTCTGGTTACACATTCACTGACTAC
TACATGCACTGGGTGCGTCAGGCCCCTGGTCAATGTCTTGAGTGGATGGGTCGTGTTAATCCTAACCGGAGGGGTACT
ACCTACAACCAGAAATTCGAGGGCCGTGTCACCATGACCACAGACACATCCACGAGCACAGCCTACATGGAGCTGCGT
AGCCTGCGTTCTGACGACACGGCCGTGTATTACTGTGCGCGTGCGAACTGGCTTGACTACTGGGGCCAGGGCACCACC
GTCACCGTCTCCTCCGGGCCCCATCATCACCATCACCAT
SEQID NO. 221
ATGGAGTTTGGGCTGAGCTGGGTTTTCCTCGTTGCTCTTTTTAGAGGTGTCCAGTGTCAGGTGCAGCTGCAGGAGAGC
GGCCCCGGCGACGTGAAGCCCAGCGAGACCCTGAGCCTGACCTGCACCGTGAGCGGCGGCAGCGTGAGCAGCGGCGAC
TACTACTGGACCTGGATCAGGCAGAGCCCCGGCAAGGGCCTGGAGTGGATCGGCCACATCTACTACAGCGGCAACACC
AACTACAACCCCAGCCTGAAGAGCAGGCTGACCATCAGCATCGACACCAGCAAGACCACCTTCAGCCTGCAGCTGAGC
AGCGTGACCGGCGAGGACACCGCCATCTACTACTGCGTGAGGGACAGGGTGACCGGCGCCTTCGACATCTGGGGCCAG
GGCACCACCGTGACCGTGAGCAGCGCCAGCACCGGCGGCGGCGGCAGCGGCGGCGGCGGCAGCGGCGGCGGCGGCAGC
GGCGGCGGCGGCAGCGACATCCAGATGACCCAGAGCCCCAGCAGCCTGGAGGCCAGCGTGGGCGACAGGGTGACCATC
ACCTGCCAGGCCAGCCAGGACATCAGCAACTACCTGAACTGGTACCAGCAGAAGCCCGGCAAGAGCCCCAAGCTGCTG
ATCTACGACGCCAGCAACCTGGAGACCGGCGTGCCCGACAGGTTCAGCGGCAGCGGCAGCGGCACCGACTTCACCTTC
ACCATCAGCAGCCTGCAGGCCGAGGACGAGGGCACCTACTTCTGCCAGCACTTCGACCACCTGCCCCTGGCCTTCGGC
GGCGGCACCAAGCTGGAGATCAAGAGGACCGGGCCCCATCATCACCATCACCAT
SEQID NO. 222
ATGGAGACAGACACACTCCTGCTATGGGTACTGCTGCTCTGGGTTCCAGGTTCCACTGGTGACATCCAGATGACCCAG
AGCCCCAGCAGCCTGAGCGCCAGCGTGGGCGACAGGGTGACCATCACCTGCCAGGCCAGCCAGGACATCAGCAACTAC
CTGAACTGGTACCAGCAGAAGCCCGGCAAGGCCCCCAAGCTGCTGATCTACGACGCCAGCAACCTGGAGACCGGCGTG
CCCAGCAGGTTCAGCGGCAGCGGCAGCGGCACCGACTTCACCTTCACCATCAGCAGCCTGCAGCCCGAGGACGAGGCC
ACCTACTTCTGCCAGCACTTCGACCACCTGCCCCTGGCCTTCGGCTGCGGCACCAAGGTGGAGATCAAGAGGACCGGC
GGCGGCGGCAGCGGCGGCGGCGGCAGCGGCGGCGGCGGCAGCGGCGGCGGCGGCAGCCAGGTGCAGCTGCAGGAGAGC
GGCCCCGGCGACGTGAAGCCCAGCGAGACCCTGAGCCTGACCTGCACCGTGAGCGGCGGCAGCGTGAGCAGCGGCGAC
TACTACTGGACCTGGATCAGGCAGAGCCCCGGCAAGTGCCTGGAGTGGATCGGCCACATCTACTACAGCGGCAACACC
AACTACAACCCCAGCCTGAAGAGCAGGCTGACCATCAGCATCGACACCAGCAAGACCCAGTTCAGCCTGAAGCTGAGC
AGCGTGACCGCCGCCGACACCGCCATCTACTACTGCGTGAGGGACAGGGTGACCGGCGCCTTCGACATCTGGGGCCAG
GGCACCACCGTGACCGTGAGCAGCGGGCCCCATCATCACCATCACCAT
SEQID NO. 223
ATGCCACCTCCTCGCCTCCTCTTCTTCCTCCTCTTCCTCACCCCCATGGAAGTCAGGCATCATCACCATCACCATCCC
GAGGAACCTCTAGTGGTGAAGGTGGAAGAGGGAGATAACGCTGTGCTGCAGTGCCTCAAGGGGACCTCAGATGGCCCC
ACTCAGCAGCTGACCTGGTCTCGGGAGTCCCCGCTTAAACCCTTCTTAAAACTCAGCCTGGGGCTGCCAGGCCTGGGA
ATCCACATGAGGCCCCTGGCCATCTGGCTTTTCATCTTCAACGTCTCTCAACAGATGGGGGGCTTCTACCTGTGCCAG
CCGGGGCCCCCCTCTGAGAAGGCCTGGCAGCCTGGCTGGACAGTCAATGTGGAGGGCAGCGGGGAGCTGTTCCGGTGG
AATGTTTCGGACCTAGGTGGCCTGGGCTGTGGCCTGAAGAACAGGTCCTCAGAGGGCCCCAGCTCCCCTTCCGGGAAG
CTCATGAGCCCCAAGCTGTATGTGTGGGCCAAAGACCGCCCTGAGATCTGGGAGGGAGAGCCTCCGTGTCTCCCACCG
AGGGACAGCCTGAACCAGAGCCTCAGCCAGGACCTCACCATGGCCCCTGGCTCCACACTCTGGCTGTCCTGTGGGGTA
CCCCCTGACTCTGTGTCCAGGGGCCCCCTCTCCTGGACCCATGTGCACCCCAAGGGGCCTAAGTCATTGCTGAGCCTA
GAGCTGAAGGACGATCGCCCGGCCAGAGATATGTGGGTAATGGAGACGGGTCTGTTGTTGCCCCGGGCCACAGCTCAA
GACGCTGGAAAGTATTATTGTCACCGTGGCAACCTGACCATGTCATTCCACCTGGAGATCACTGCTCGGCCAGGGGGA
GGTGGGTCTGGAGGTGGAGGATCTGGTGGAGGTGGGTCTGTCAGATCATCTTCTCGAACCCCGAGTGACAAGCCTGTA
GCCCATGTTGTAGCAAACCCTCAAGCTGAGGGGCAGCTCCAGTGGCTGAACCGCCGGGCCAATGCCCTCCTGGCCAAT
GGCGTGGAGCTGAGAGATAACCAGCTGGTGGTGCCATCAGAGGGCCTGTACCTCATCTACTCCCAGGTCCTCTTCAAG
GGCCAAGGCTGCCCCTCCACCCATGTGCTCCTCACCCACACCATCAGCCGCATCGCCGTCTCCTACCAGACCAAGGTC
AACCTCCTCTCTGCCATCAAGAGCCCCTGCCAGAGGGAGACCCCAGAGGGGGCTGAGGCCAAGCCCTGGTATGAGCCC
ATCTATCTGGGAGGGGTCTTCCAGCTGGAGAAGGGTGACCGACTCAGCGCTGAGATCAATCGGCCCGACTATCTCGAC
TTTGCCGAGTCTGGGCAGGTCTACTTTGGGATCATTGCCCTG
SEQID NO. 224
ATGGAGTTTGGGCTGAGCTGGGTTTTCCTCGTTGCTCTTTTTAGAGGTGTCCAGTGTGAGGTGCAGCTGGTGGAGTCT
GGTGGTGGTCTTGTTCAACCTGGTGGTTCTCTTCGTCTTTCTTGTGCTGCTTCTGGTTTTAATATTAAAGATACTTAT
ATTCATTGGGTTCGTCAAGCTCCTGGTAAAGGTCTTGAATGGGTTGCTCGTATTTATCCTACTAATGGTTATACTCGT
TATGCTGATTCTGTTAAAGGTCGTTTTACTATTTCTGCTGATACTTCTAAAAATACTGCTTATCTTCAAATGAACTCT
CTTCGTGCTGAAGATACTGCTGTTTATTATTGTTCTCGTTGGGGTGGTGATGGTTTTTATGCTATGGATTATTGGGGT
CAAGGTACTCTTGTCACCGTCTCCTCAGCTAGCACCGGGGGAGGTGGGTCTGGAGGTGGAGGATCTGGTGGAGGTGGG
TCTGACATCCAGATGACCCAGTCTCCTTCTTCTCTTTCTGCTTCTGTTGGTGATCGTGTTACTATTACTTGTCGTGCT
TCTCAAGATGTTAATACTGCTGTTGCTTGGTATCAACAAAAACCTGGTAAAGCTCCTAAACTTCTTATTTATTCTGCT
TCTTTTCTTTATTCTGGTGTTCCTTCTCGTTTTTCTGGTTCTCGTTCTGGTACTGATTTTACTCTTACTATTTCTTCT
CTTCAACCTGAAGATTTTGCTACTTATTATTGTCAACAACATTATACTACTCCTCCTACTTTTGGTCAAGGTACCAAG
GTGGAGATCAAACGTACGGACAAAACTCACACATCGCCACCGTCCCCAGCACCTGAAGCCGCGGGGGGACCGTCAGAA
GTCAGGCCCGAGGAACCTCTAGTGGTGAAGGTGGAAGAGGGAGATAACGCTGTGCTGCAGTGCCTCAAGGGGACCTCA
GATGGCCCCACTCAGCAGCTGACCTGGTCTCGGGAGTCCCCGCTTAAACCCTTCTTAAAACTCAGCCTGGGGCTGCCA
GGCCTGGGAATCCACATGAGGCCCCTGGCCATCTGGCTTTTCATCTTCAACGTCTCTCAACAGATGGGGGGCTTCTAC
CTGTGCCAGCCGGGGCCCCCCTCTGAGAAGGCCTGGCAGCCTGGCTGGACAGTCAATGTGGAGGGCAGCGGGTCTAGA
GGGCCCCATCATCACCATCACCAT
SEQID NO. 225
ATGGAGTTTGGGCTGAGCTGGGTTTTCCTCGTTGCTCTTTTTAGAGGTGTCCAGTGTGAGGTGCAGCTGGTGGAGTCT
GGTGGTGGTCTTGTTCAACCTGGTGGTTCTCTTCGTCTTTCTTGTGCTGCTTCTGGTTTTAATATTAAAGATACTTAT
ATTCATTGGGTTCGTCAAGCTCCTGGTAAAGGTCTTGAATGGGTTGCTCGTATTTATCCTACTAATGGTTATACTCGT
TATGCTGATTCTGTTAAAGGTCGTTTTACTATTTCTGCTGATACTTCTAAAAATACTGCTTATCTTCAAATGAACTCT
CTTCGTGCTGAAGATACTGCTGTTTATTATTGTTCTCGTTGGGGTGGTGATGGTTTTTATGCTATGGATTATTGGGGT
CAAGGTACTCTTGTCACCGTCTCCTCAGCTAGCACCGGGGGAGGTGGGTCTGGAGGTGGAGGATCTGGTGGAGGTGGG
TCTGACATCCAGATGACCCAGTCTCCTTCTTCTCTTTCTGCTTCTGTTGGTGATCGTGTTACTATTACTTGTCGTGCT
TCTCAAGATGTTAATACTGCTGTTGCTTGGTATCAACAAAAACCTGGTAAAGCTCCTAAACTTCTTATTTATTCTGCT
TCTTTTCTTTATTCTGGTGTTCCTTCTCGTTTTTCTGGTTCTCGTTCTGGTACTGATTTTACTCTTACTATTTCTTCT
CTTCAACCTGAAGATTTTGCTACTTATTATTGTCAACAACATTATACTACTCCTCCTACTTTTGGTCAAGGTACCAAG
GTGGAGATCAAACGTACGGACAAAACTCACACATCGCCACCGTCCCCAGCACCTGAAGCCGCGGGGGGACCGTCAGAA
GTCAGGCCCGAGGAACCTCTAGTGGTGAAGGTGGAAGAGGGAGATAACGCTGTGCTGCAGTGCCTCAAGGGGACCTCA
GATGGCCCCACTCAGCAGCTGACCTGGTCTCGGGAGTCCCCGCTTAAACCCTTCTTAAAACTCAGCCTGGGGCTGCCA
GGCCTGGGAATCCACATGAGGCCCCTGGCCATCTGGCTTTTCATCTTCAACGTCTCTCAACAGATGGGGGGCTTCTAC
CTGTGCCAGCCGGGGCCCCCCTCTGAGAAGGCCTGGCAGCCTGGCTGGACAGTCAATGTGGAGGGCAGCGGGGACAAA
ACTCACACATGCCCACCGTGCCCAGCACCTGAACTCCTGGGGGGACCGTCAGTCTTCCTCTTCCCCCCAAAACCCAAG
GACACCCTCATGATCTCCCGGACCCCTGAGGTCACATGCGTGGTGGTGGACGTGAGCCACGAAGACCCTGAGGTCAAG
TTCAACTGGTACGTGGACGGCGTGGAGGTGCATAATGCCAAGACAAAGCCGCGGGAGGAGCAGTACAACAGCACGTAC
CGTGTGGTCAGCGTCCTCACCGTCCTGCACCAGGACTGGCTGAATGGCAAGGAGTACAAGTGCAAGGTCTCCAACAAA
GCCCTCCCAGCCCCCATCGAGAAAACCATCTCCAAAGCCAAAGGGCAGCCCCGAGAACCACAGGTGTACACCCTGCCC
CCATCCCGGGAGGAGATGACCAAGAACCAGGTCAGCCTGACCTGCCTGGTCAAAGGCTTCTATCCCAGCGACATCGCC
GTGGAGTGGGAGAGCAATGGGCAGCCGGAGAACAACTACAAGACCACGCCTCCCGTGCTGGACTCCGACGGCTCCTTC
TTCCTCTACAGCAAGCTCACCGTGGACAAGAGCAGGTGGCAGCAGGGGAACGTCTTCTCATGCTCCGTGATGCACGAG
GCTCTGCACAACCACTACACGCAGAAGAGCCTCTCCCTGTCTCCGGGT
SEQID NO. 226
ATGCCACCTCCTCGCCTCCTCTTCTTCCTCCTCTTCCTCACCCCCATGGAAGTCAGGCCCGAGGAACCTCTAGTGGTG
AAGGTGGAAGAGGGAGATAACGCTGTGCTGCAGTGCCTCAAGGGGACCTCAGATGGCCCCACTCAGCAGCTGACCTGG
TCTCGGGAGTCCCCGCTTAAACCCTTCTTAAAACTCAGCCTGGGGCTGCCAGGCCTGGGAATCCACATGAGGCCCCTG
GCCATCTGGCTTTTCATCTTCAACGTCTCTCAACAGATGGGGGGCTTCTACCTGTGCCAGCCGGGGCCCCCCTCTGAG
AAGGCCTGGCAGCCTGGCTGGACAGTCAATGTGGAGGGCAGCGGGGGGGGAGGTGGGTCTGGAGGTGGAGGATCTGGT
GGAGGTGGGTCTGGTGGAGGTGGGTCTGAGGTGCAGCTGGTGGAGTCTGGTGGTGGTCTTGTTCAACCTGGTGGTTCT
CTTCGTCTTTCTTGTGCTGCTTCTGGTTTTAATATTAAAGATACTTATATTCATTGGGTTCGTCAAGCTCCTGGTAAA
GGTCTTGAATGGGTTGCTCGTATTTATCCTACTAATGGTTATACTCGTTATGCTGATTCTGTTAAAGGTCGTTTTACT
ATTTCTGCTGATACTTCTAAAAATACTGCTTATCTTCAAATGAACTCTCTTCGTGCTGAAGATACTGCTGTTTATTAT
TGTTCTCGTTGGGGTGGTGATGGTTTTTATGCTATGGATTATTGGGGTCAAGGTACTCTTGTCACCGTCTCCTCAGCT
AGCACCGGGGGAGGTGGGTCTGGAGGTGGAGGATCTGGTGGAGGTGGGTCTGACATCCAGATGACCCAGTCTCCTTCT
TCTCTTTCTGCTTCTGTTGGTGATCGTGTTACTATTACTTGTCGTGCTTCTCAAGATGTTAATACTGCTGTTGCTTGG
TATCAACAAAAACCTGGTAAAGCTCCTAAACTTCTTATTTATTCTGCTTCTTTTCTTTATTCTGGTGTTCCTTCTCGT
TTTTCTGGTTCTCGTTCTGGTACTGATTTTACTCTTACTATTTCTTCTCTTCAACCTGAAGATTTTGCTACTTATTAT
TGTCAACAACATTATACTACTCCTCCTACTTTTGGTCAAGGTACCAAGGTGGAGATCAAACGTACGTCTAGAGGGCCC
CATCATCACCATCACCAT
SEQID NO. 227
ATGCCACCTCCTCGCCTCCTCTTCTTCCTCCTCTTCCTCACCCCCATGGAAGTCAGGCCCGAGGAACCTCTAGTGGTG
AAGGTGGAAGAGGGAGATAACGCTGTGCTGCAGTGCCTCAAGGGGACCTCAGATGGCCCCACTCAGCAGCTGACCTGG
TCTCGGGAGTCCCCGCTTAAACCCTTCTTAAAACTCAGCCTGGGGCTGCCAGGCCTGGGAATCCACATGAGGCCCCTG
GCCATCTGGCTTTTCATCTTCAACGTCTCTCAACAGATGGGGGGCTTCTACCTGTGCCAGCCGGGGCCCCCCTCTGAG
AAGGCCTGGCAGCCTGGCTGGACAGTCAATGTGGAGGGCAGCGGGGGGGGAGGTGGGTCTGGAGGTGGAGGATCTGGT
GGAGGTGGGTCTGGTGGAGGTGGGTCTGAGGTGCAGCTGGTGGAGTCTGGTGGTGGTCTTGTTCAACCTGGTGGTTCT
CTTCGTCTTTCTTGTGCTGCTTCTGGTTTTAATATTAAAGATACTTATATTCATTGGGTTCGTCAAGCTCCTGGTAAA
GGTCTTGAATGGGTTGCTCGTATTTATCCTACTAATGGTTATACTCGTTATGCTGATTCTGTTAAAGGTCGTTTTACT
ATTTCTGCTGATACTTCTAAAAATACTGCTTATCTTCAAATGAACTCTCTTCGTGCTGAAGATACTGCTGTTTATTAT
TGTTCTCGTTGGGGTGGTGATGGTTTTTATGCTATGGATTATTGGGGTCAAGGTACTCTTGTCACCGTCTCCTCAGCT
AGCACCGGGGGAGGTGGGTCTGGAGGTGGAGGATCTGGTGGAGGTGGGTCTGACATCCAGATGACCCAGTCTCCTTCT
TCTCTTTCTGCTTCTGTTGGTGATCGTGTTACTATTACTTGTCGTGCTTCTCAAGATGTTAATACTGCTGTTGCTTGG
TATCAACAAAAACCTGGTAAAGCTCCTAAACTTCTTATTTATTCTGCTTCTTTTCTTTATTCTGGTGTTCCTTCTCGT
TTTTCTGGTTCTCGTTCTGGTACTGATTTTACTCTTACTATTTCTTCTCTTCAACCTGAAGATTTTGCTACTTATTAT
TGTCAACAACATTATACTACTCCTCCTACTTTTGGTCAAGGTACCAAGGTGGAGATCAAACGTACGGACAAAACTCAC
ACATGCCCACCGTGCCCAGCACCTGAACTCCTGGGGGGACCGTCAGTCTTCCTCTTCCCCCCAAAACCCAAGGACACC
CTCATGATCTCCCGGACCCCTGAGGTCACATGCGTGGTGGTGGACGTGAGCCACGAAGACCCTGAGGTCAAGTTCAAC
TGGTACGTGGACGGCGTGGAGGTGCATAATGCCAAGACAAAGCCGCGGGAGGAGCAGTACAACAGCACGTACCGTGTG
GTCAGCGTCCTCACCGTCCTGCACCAGGACTGGCTGAATGGCAAGGAGTACAAGTGCAAGGTCTCCAACAAAGCCCTC
CCAGCCCCCATCGAGAAAACCATCTCCAAAGCCAAAGGGCAGCCCCGAGAACCACAGGTGTACACCCTGCCCCCATCC
CGGGAGGAGATGACCAAGAACCAGGTCAGCCTGACCTGCCTGGTCAAAGGCTTCTATCCCAGCGACATCGCCGTGGAG
TGGGAGAGCAATGGGCAGCCGGAGAACAACTACAAGACCACGCCTCCCGTGCTGGACTCCGACGGCTCCTTCTTCCTC
TACAGCAAGCTCACCGTGGACAAGAGCAGGTGGCAGCAGGGGAACGTCTTCTCATGCTCCGTGATGCACGAGGCTCTG
CACAACCACTACACGCAGAAGAGCCTCTCCCTGTCTCCGGGT
SEQID NO. 228
ATGCCACCTCCTCGCCTCCTCTTCTTCCTCCTCTTCCTCACCCCCATGGAAGTCAGGCCCGAGGAACCTCTAGTGGTG
AAGGTGGAAGAGGGAGATAACGCTGTGCTGCAGTGCCTCAAGGGGACCTCAGATGGCCCCACTCAGCAGCTGACCTGG
TCTCGGGAGTCCCCGCTTAAACCCTTCTTAAAACTCAGCCTGGGGCTGCCAGGCCTGGGAATCCACATGAGGCCCCTG
GCCATCTGGCTTTTCATCTTCAACGTCTCTCAACAGATGGGGGGCTTCTACCTGTGCCAGCCGGGGCCCCCCTCTGAG
AAGGCCTGGCAGCCTGGCTGGACAGTCAATGTGGAGGGCAGCGGGGAGCTGTTCCGGTGGAATGTTTCGGACCTAGGT
GGCCTGGGCTGTGGCCTGAAGAACAGGTCCTCAGAGGGCCCCAGCTCCCCTTCCGGGAAGCTCATGAGCCCCAAGCTG
TATGTGTGGGCCAAAGACCGCCCTGAGATCTGGGAGGGAGAGCCTCCGTGTCTCCCACCGAGGGACAGCCTGAACCAG
AGCCTCAGCCAGGACCTCACCATGGCCCCTGGCTCCACACTCTGGCTGTCCTGTGGGGTACCCCCTGACTCTGTGTCC
AGGGGCCCCCTCTCCTGGACCCATGTGCACCCCAAGGGGCCTAAGTCATTGCTGAGCCTAGAGCTGAAGGACGATCGC
CCGGCCAGAGATATGTGGGTAATGGAGACGGGTCTGTTGTTGCCCCGGGCCACAGCTCAAGACGCTGGAAAGTATTAT
TGTCACCGTGGCAACCTGACCATGTCATTCCACCTGGAGATCACTGCTCGGCCACATCATCACCATCACCAT
SEQID NO. 229
ATGCCACCTCCTCGCCTCCTCTTCTTCCTCCTCTTCCTCACCCCCATGGAAGTCAGGCCCGAGGAACCTCTAGTGGTG
AAGGTGGAAGAGGGAGATAACGCTGTGCTGCAGTGCCTCAAGGGGACCTCAGATGGCCCCACTCAGCAGCTGACCTGG
TCTCGGGAGTCCCCGCTTAAACCCTTCTTAAAACTCAGCCTGGGGCTGCCAGGCCTGGGAATCCACATGAGGCCCCTG
GCCATCTGGCTTTTCATCTTCAACGTCTCTCAACAGATGGGGGGCTTCTACCTGTGCCAGCCGGGGCCCCCCTCTGAG
AAGGCCTGGCAGCCTGGCTGGACAGTCAATGTGGAGGGCAGCGGGGAGCTGTTCCGGTGGAATGTTTCGGACCTAGGT
GGCCTGGGCTGTGGCCTGAAGAACAGGTCCTCAGAGGGCCCCAGCTCCCCTTCCGGGAAGCTCATGAGCCCCAAGCTG
TATGTGTGGGCCAAAGACCGCCCTGAGATCTGGGAGGGAGAGCCTCCGTGTCTCCCACCGAGGGACAGCCTGAACCAG
AGCCTCAGCCAGGACCTCACCATGGCCCCTGGCTCCACACTCTGGCTGTCCTGTGGGGTACCCCCTGACTCTGTGTCC
AGGGGCCCCCTCTCCTGGACCCATGTGCACCCCAAGGGGCCTAAGTCATTGCTGAGCCTAGAGCTGAAGGACGATCGC
CCGGCCAGAGATATGTGGGTAATGGAGACGGGTCTGTTGTTGCCCCGGGCCACAGCTCAAGACGCTGGAAAGTATTAT
TGTCACCGTGGCAACCTGACCATGTCATTCCACCTGGAGATCACTGCTCGGCCAGACAAAACTCACACATGCCCACCG
TGCCCAGCACCTGAACTCCTGGGGGGACCGTCAGTCTTCCTCTTCCCCCCAAAACCCAAGGACACCCTCATGATCTCC
CGGACCCCTGAGGTCACATGCGTGGTGGTGGACGTGAGCCACGAAGACCCTGAGGTCAAGTTCAACTGGTACGTGGAC
GGCGTGGAGGTGCATAATGCCAAGACAAAGCCGCGGGAGGAGCAGTACAACAGCACGTACCGTGTGGTCAGCGTCCTC
ACCGTCCTGCACCAGGACTGGCTGAATGGCAAGGAGTACAAGTGCAAGGTCTCCAACAAAGCCCTCCCAGCCCCCATC
GAGAAAACCATCTCCAAAGCCAAAGGGCAGCCCCGAGAACCACAGGTGTACACCCTGCCCCCATCCCGGGAGGAGATG
ACCAAGAACCAGGTCAGCCTGACCTGCCTGGTCAAAGGCTTCTATCCCAGCGACATCGCCGTGGAGTGGGAGAGCAAT
GGGCAGCCGGAGAACAACTACAAGACCACGCCTCCCGTGCTGGACTCCGACGGCTCCTTCTTCCTCTACAGCAAGCTC
ACCGTGGACAAGAGCAGGTGGCAGCAGGGGAACGTCTTCTCATGCTCCGTGATGCACGAGGCTCTGCACAACCACTAC
ACGCAGAAGAGCCTCTCCCTGTCTCCGGGT
SEQID NO. 230
ATGCCACCTCCTCGCCTCCTCTTCTTCCTCCTCTTCCTCACCCCCATGGAAGTCAGGCCGAGGGACAGCCTGAACCAG
AGCCTCAGCCAGGACCTCACCATGGCCCCTGGCTCCACACTCTGGCTGTCCTGTGGGGTACCCCCTGACTCTGTGTCC
AGGGGCCCCCTCTCCTGGACCCATGTGCACCCCAAGGGGCCTAAGTCATTGCTGAGCCTAGAGCTGAAGGACGATCGC
CCGGCCAGAGATATGTGGGTAATGGAGACGGGTCTGTTGTTGCCCCGGGCCACAGCTCAAGACGCTGGAAAGTATTAT
TGTCACCGTGGCAACCTGACCATGTCATTCCACCTGGAGATCACTGCTCGGCCACATCATCACCATCACCAT
SEQID NO. 231
ATGCCACCTCCTCGCCTCCTCTTCTTCCTCCTCTTCCTCACCCCCATGGAAGTCAGGCCGAGGGACAGCCTGAACCAG
AGCCTCAGCCAGGACCTCACCATGGCCCCTGGCTCCACACTCTGGCTGTCCTGTGGGGTACCCCCTGACTCTGTGTCC
AGGGGCCCCCTCTCCTGGACCCATGTGCACCCCAAGGGGCCTAAGTCATTGCTGAGCCTAGAGCTGAAGGACGATCGC
CCGGCCAGAGATATGTGGGTAATGGAGACGGGTCTGTTGTTGCCCCGGGCCACAGCTCAAGACGCTGGAAAGTATTAT
TGTCACCGTGGCAACCTGACCATGTCATTCCACCTGGAGATCACTGCTCGGCCAGACAAAACTCACACATGCCCACCG
TGCCCAGCACCTGAACTCCTGGGGGGACCGTCAGTCTTCCTCTTCCCCCCAAAACCCAAGGACACCCTCATGATCTCC
CGGACCCCTGAGGTCACATGCGTGGTGGTGGACGTGAGCCACGAAGACCCTGAGGTCAAGTTCAACTGGTACGTGGAC
GGCGTGGAGGTGCATAATGCCAAGACAAAGCCGCGGGAGGAGCAGTACAACAGCACGTACCGTGTGGTCAGCGTCCTC
ACCGTCCTGCACCAGGACTGGCTGAATGGCAAGGAGTACAAGTGCAAGGTCTCCAACAAAGCCCTCCCAGCCCCCATC
GAGAAAACCATCTCCAAAGCCAAAGGGCAGCCCCGAGAACCACAGGTGTACACCCTGCCCCCATCCCGGGAGGAGATG
ACCAAGAACCAGGTCAGCCTGACCTGCCTGGTCAAAGGCTTCTATCCCAGCGACATCGCCGTGGAGTGGGAGAGCAAT
GGGCAGCCGGAGAACAACTACAAGACCACGCCTCCCGTGCTGGACTCCGACGGCTCCTTCTTCCTCTACAGCAAGCTC
ACCGTGGACAAGAGCAGGTGGCAGCAGGGGAACGTCTTCTCATGCTCCGTGATGCACGAGGCTCTGCACAACCACTAC
ACGCAGAAGAGCCTCTCCCTGTCTCCGGGT
SEQID NO. 232
ATGCCACCTCCTCGCCTCCTCTTCTTCCTCCTCTTCCTCACCCCCATGGAAGTCAGGCCCGAGGAACCTCTAGTGGTG
AAGGTGGAAGAGGGAGATAACGCTGTGCTGCAGTGCCTCAAGGGGACCTCAGATGGCCCCACTCAGCAGCTGACCTGG
TCTCGGGAGTCCCCGCTTAAACCCTTCTTAAAACTCAGCCTGGGGCTGCCAGGCCTGGGAATCCACATGAGGCCCCTG
GCCATCTGGCTTTTCATCTTCAACGTCTCTCAACAGATGGGGGGCTTCTACCTGTGCCAGCCGGGGCCCCCCTCTGAG
AAGGCCTGGCAGCCTGGCTGGACAGTCAATGTGGAGGGCAGCGGGGAGCTGTTCCGGTGGAATGTTTCGGACCTAGGT
GGCCTGGGCTGTGGCCTGAAGAACAGGTCCTCAGAGGGCCCCAGCTCCCCTTCCGGGAAGCTCATGAGCCCCAAGCTG
TATGTGTGGGCCAAAGACCGCCCTGAGATCTGGGAGGGAGAGCCTCCGTGTCTCCCACCGAGGGACAGCCTGAACCAG
AGCCTCAGCCAGGACCTCACCATGGCCCCTGGCTCCACACTCTGGCTGTCCTGTGGGGTACCCCCTGACTCTGTGTCC
AGGGGCCCCCTCTCCTGGACCCATGTGCACCCCAAGGGGCCTAAGTCATTGCTGAGCCTAGAGCTGAAGGACGATCGC
CCGGCCAGAGATATGTGGGTAATGGAGACGGGTCTGTTGTTGCCCCGGGCCACAGCTCAAGACGCTGGAAAGTATTAT
TGTCACCGTGGCAACCTGACCATGTCATTCCACCTGGAGATCACTGCTCGGCCAGGAGGAGGTGGGTCTGGAGGTGGA
GGATCTGGTGGAGGTGGGTCTGACATCCAGATGACCCAGTCTCCATCCTCCCTGTCTGCATCTGTAGGAGACAGAGTC
ACCATCACTTGCCAGGCGAGTCAGGACATCAGCAACTATTTAAATTGGTATCAGCAGAAACCAGGGAAAGCCCCTAAA
CTCCTGATCTACGATGCATCCAATTTGGAAACAGGGGTCCCATCAAGGTTCAGTGGAAGTGGATCTGGGACAGATTTT
ACTTTCACCATCAGCAGCCTGCAGCCTGAAGATATTGCAACATATTTCTGTCAACACTTTGATCATCTCCCGCTCGCT
TTCGGCGGAGGGACCAAGGTGGAGATCAAACGAACTGTGGCTGCACCATCTGTCTTCATCTTCCCGCCATCTGATGAG
CAGTTGAAATCTGGAACTGCCTCTGTTGTGTGCCTGCTGAATAACTTCTATCCCAGAGAGGCCAAAGTACAGTGGAAG
GTGGATAACGCCCTCCAATCGGGTAACTCCCAGGAGAGTGTCACAGAGCAGGACAGCAAGGACAGCACCTACAGCCTC
AGCAGCACCCTGACGCTGAGCAAAGCAGACTACGAGAAACACAAAGTCTACGCCTGCGAAGTCACCCATCAGGGCCTG
AGCTCGCCCGTCACAAAGAGCTTCAACAGGGGAGAGTGT
SEQID NO. 233
ATGCCACCTCCTCGCCTCCTCTTCTTCCTCCTCTTCCTCACCCCCATGGAAGTCAGGCCCGAGGAACCTCTAGTGGTG
AAGGTGGAAGAGGGAGATAACGCTGTGCTGCAGTGCCTCAAGGGGACCTCAGATGGCCCCACTCAGCAGCTGACCTGG
TCTCGGGAGTCCCCGCTTAAACCCTTCTTAAAACTCAGCCTGGGGCTGCCAGGCCTGGGAATCCACATGAGGCCCCTG
GCCATCTGGCTTTTCATCTTCAACGTCTCTCAACAGATGGGGGGCTTCTACCTGTGCCAGCCGGGGCCCCCCTCTGAG
AAGGCCTGGCAGCCTGGCTGGACAGTCAATGTGGAGGGCAGCGGGGAGCTGTTCCGGTGGAATGTTTCGGACCTAGGT
GGCCTGGGCTGTGGCCTGAAGAACAGGTCCTCAGAGGGCCCCAGCTCCCCTTCCGGGAAGCTCATGAGCCCCAAGCTG
TATGTGTGGGCCAAAGACCGCCCTGAGATCTGGGAGGGAGAGCCTCCGTGTCTCCCACCGAGGGACAGCCTGAACCAG
AGCCTCAGCCAGGACCTCACCATGGCCCCTGGCTCCACACTCTGGCTGTCCTGTGGGGTACCCCCTGACTCTGTGTCC
AGGGGCCCCCTCTCCTGGACCCATGTGCACCCCAAGGGGCCTAAGTCATTGCTGAGCCTAGAGCTGAAGGACGATCGC
CCGGCCAGAGATATGTGGGTAATGGAGACGGGTCTGTTGTTGCCCCGGGCCACAGCTCAAGACGCTGGAAAGTATTAT
TGTCACCGTGGCAACCTGACCATGTCATTCCACCTGGAGATCACTGCTCGGCCAGGAGGAGGTGGGTCTGGAGGTGGA
GGATCTGGTGGAGGTGGGTCTCAGGTGCAGCTGCAGGAGTCGGGCCCAGGACTGGTGAAGCCTTCGGAGACCCTGTCC
CTCACCTGCACTGTCTCTGGTGGCTCCGTCAGCAGTGGTGATTACTACTGGACCTGGATCCGGCAGTCCCCAGGGAAG
GGACTGGAGTGGATTGGACACATCTATTACAGTGGGAACACCAATTATAACCCCTCCCTCAAGAGTCGACTCACCATA
TCAATTGACACGTCCAAGACTCAGTTCTCCCTGAAGCTGAGTTCTGTGACCGCTGCGGACACGGCCATTTATTACTGT
GTGCGAGATCGAGTGACTGGTGCTTTTGATATCTGGGGCCAAGGGACAATGGTCACCGTCTCTTCAGCCTCCACCAAG
GGCCCATCGGTCTTCCCCCTGGCGCCCTGCTCCAGGAGCACCTCCGAGAGCACAGCGGCCCTGGGCTGCCTGGTCAAG
GACTACTTCCCTGAACCGGTGACGGTGTCGTGGAACTCAGGCGCTCTGACCAGCGGCGTGCACACCTTCCCGGCTGTC
CTACAGTCCTCAGGACTCTACTCCCTCAGCAGCGTGGTGACCGTGCCCTCCAGCAACTTCGGCACCCAGACCTACACC
TGCAACGTAGATCACAAGCCCAGCAATACCAAGGTGGACAAGACAGTTGAGCGCAAATGTTGTGTCGAGTGCCCACCG
TGCCCAGCACCACCTGTGGCAGGACCGTCAGTCTTCCTCTTCCCCCCAAAACCCAAGGACACCCTCATGATCTCCCGG
ACCCCTGAGGTCACGTGCGTGGTGGTGGACGTGAGCCACGAAGACCCCGAGGTCCAGTTCAACTGGTACGTGGACGGC
GTGGAGGTGCATAATGCCAAGACAAAGCCACGGGAGGAGCAGTTCCAAAGCACGTTCCGTGTGGTCAGCGTCCTCACC
GTCGTGCACCAGGACTGGCTGAACGGCAAGGAGTACAAGTGCAAGGTCTCCAACAAAGGCCTCCCAGCCCCCATCGAG
AAAACCATCTCCAAAACCAAAGGGCAGCCCCGAGAACCACAGGTGTACACCCTGCCCCCATCCCGGGAGGAGATGACC
AAGAACCAGGTCAGCCTGACCTGCCTGGTCAAAGGCTTCTACCCCAGCGACATCGCCGTGGAGTGGGAGAGCAATGGG
CAGCCGGAGAACAACTACAAGACCACGCCTCCCATGCTGGACTCCGACGGCTCCTTCTTCCTCTACAGCAAGCTCACC
GTGGACAAGAGCAGGTGGCAGCAGGGGAACGTCTTCTCATGCTCCGTGATGCATGAGGCTCTGCACAACCACTACACG
CAGAAGAGCCTCTCCCTGTCTCCGGGT
SEQID NO. 234
ATGGAGACAGACACACTCCTGCTATGGGTACTGCTGCTCTGGGTTCCAGGTTCCACTGGTGACATCCAGATGACCCAG
TCTCCATCCTCCCTGTCTGCATCTGTAGGAGACAGAGTCACCATCACTTGCCAGGCGAGTCAGGACATCAGCAACTAT
TTAAATTGGTATCAGCAGAAACCAGGGAAAGCCCCTAAACTCCTGATCTACGATGCATCCAATTTGGAAACAGGGGTC
CCATCAAGGTTCAGTGGAAGTGGATCTGGGACAGATTTTACTTTCACCATCAGCAGCCTGCAGCCTGAAGATATTGCA
ACATATTTCTGTCAACACTTTGATCATCTCCCGCTCGCTTTCGGCGGAGGGACCAAGGTGGAGATCAAACGAACTGTG
GCTGCACCATCTGTCTTCATCTTCCCGCCATCTGATGAGCAGTTGAAATCTGGAACTGCCTCTGTTGTGTGCCTGCTG
AATAACTTCTATCCCAGAGAGGCCAAAGTACAGTGGAAGGTGGATAACGCCCTCCAATCGGGTAACTCCCAGGAGAGT
GTCACAGAGCAGGACAGCAAGGACAGCACCTACAGCCTCAGCAGCACCCTGACGCTGAGCAAAGCAGACTACGAGAAA
CACAAAGTCTACGCCTGCGAAGTCACCCATCAGGGCCTGAGCTCGCCCGTCACAAAGAGCTTCAACAGGGGAGAGTGT
GACAAAACTCACACATCGCCACCGTCCCCAGCACCTGAAGCCGCGGGGGGACCGTCACCCGAGGAACCTCTAGTGGTG
AAGGTGGAAGAGGGAGATAACGCTGTGCTGCAGTGCCTCAAGGGGACCTCAGATGGCCCCACTCAGCAGCTGACCTGG
TCTCGGGAGTCCCCGCTTAAACCCTTCTTAAAACTCAGCCTGGGGCTGCCAGGCCTGGGAATCCACATGAGGCCCCTG
GCCATCTGGCTTTTCATCTTCAACGTCTCTCAACAGATGGGGGGCTTCTACCTGTGCCAGCCGGGGCCCCCCTCTGAG
AAGGCCTGGCAGCCTGGCTGGACAGTCAATGTGGAGGGCAGCGGGGAGCTGTTCCGGTGGAATGTTTCGGACCTAGGT
GGCCTGGGCTGTGGCCTGAAGAACAGGTCCTCAGAGGGCCCCAGCTCCCCTTCCGGGAAGCTCATGAGCCCCAAGCTG
TATGTGTGGGCCAAAGACCGCCCTGAGATCTGGGAGGGAGAGCCTCCGTGTCTCCCACCGAGGGACAGCCTGAACCAG
AGCCTCAGCCAGGACCTCACCATGGCCCCTGGCTCCACACTCTGGCTGTCCTGTGGGGTACCCCCTGACTCTGTGTCC
AGGGGCCCCCTCTCCTGGACCCATGTGCACCCCAAGGGGCCTAAGTCATTGCTGAGCCTAGAGCTGAAGGACGATCGC
CCGGCCAGAGATATGTGGGTAATGGAGACGGGTCTGTTGTTGCCCCGGGCCACAGCTCAAGACGCTGGAAAGTATTAT
TGTCACCGTGGCAACCTGACCATGTCATTCCACCTGGAGATCACTGCTCGGCCA
SEQID NO. 235
ATGGAGTTTGGGCTGAGCTGGGTTTTCCTCGTTGCTCTTTTTAGAGGTGTCCAGTGTCAGGTGCAGCTGCAGGAGTCG
GGCCCAGGACTGGTGAAGCCTTCGGAGACCCTGTCCCTCACCTGCACTGTCTCTGGTGGCTCCGTCAGCAGTGGTGAT
TACTACTGGACCTGGATCCGGCAGTCCCCAGGGAAGGGACTGGAGTGGATTGGACACATCTATTACAGTGGGAACACC
AATTATAACCCCTCCCTCAAGAGTCGACTCACCATATCAATTGACACGTCCAAGACTCAGTTCTCCCTGAAGCTGAGT
TCTGTGACCGCTGCGGACACGGCCATTTATTACTGTGTGCGAGATCGAGTGACTGGTGCTTTTGATATCTGGGGCCAA
GGGACAATGGTCACCGTCTCTTCAGCCTCCACCAAGGGCCCATCGGTCTTCCCCCTGGCGCCCTGCTCCAGGAGCACC
TCCGAGAGCACAGCGGCCCTGGGCTGCCTGGTCAAGGACTACTTCCCTGAACCGGTGACGGTGTCGTGGAACTCAGGC
GCTCTGACCAGCGGCGTGCACACCTTCCCGGCTGTCCTACAGTCCTCAGGACTCTACTCCCTCAGCAGCGTGGTGACC
GTGCCCTCCAGCAACTTCGGCACCCAGACCTACACCTGCAACGTAGATCACAAGCCCAGCAATACCAAGGTGGACAAG
ACAGTTGAGCGCAAATGTTGTGTCGAGTGCCCACCGTGCCCAGCACCACCTGTGGCAGGACCGTCAGTCTTCCTCTTC
CCCCCAAAACCCAAGGACACCCTCATGATCTCCCGGACCCCTGAGGTCACGTGCGTGGTGGTGGACGTGAGCCACGAA
GACCCCGAGGTCCAGTTCAACTGGTACGTGGACGGCGTGGAGGTGCATAATGCCAAGACAAAGCCACGGGAGGAGCAG
TTCCAAAGCACGTTCCGTGTGGTCAGCGTCCTCACCGTCGTGCACCAGGACTGGCTGAACGGCAAGGAGTACAAGTGC
AAGGTCTCCAACAAAGGCCTCCCAGCCCCCATCGAGAAAACCATCTCCAAAACCAAAGGGCAGCCCCGAGAACCACAG
GTGTACACCCTGCCCCCATCCCGGGAGGAGATGACCAAGAACCAGGTCAGCCTGACCTGCCTGGTCAAAGGCTTCTAC
CCCAGCGACATCGCCGTGGAGTGGGAGAGCAATGGGCAGCCGGAGAACAACTACAAGACCACGCCTCCCATGCTGGAC
TCCGACGGCTCCTTCTTCCTCTACAGCAAGCTCACCGTGGACAAGAGCAGGTGGCAGCAGGGGAACGTCTTCTCATGC
TCCGTGATGCATGAGGCTCTGCACAACCACTACACGCAGAAGAGCCTCTCCCTGTCTCCGGGTGGTGGAGGTGGGTCT
GGAGGTGGAGGATCTGGTGGAGGTGGGTCTCCCGAGGAACCTCTAGTGGTGAAGGTGGAAGAGGGAGATAACGCTGTG
CTGCAGTGCCTCAAGGGGACCTCAGATGGCCCCACTCAGCAGCTGACCTGGTCTCGGGAGTCCCCGCTTAAACCCTTC
TTAAAACTCAGCCTGGGGCTGCCAGGCCTGGGAATCCACATGAGGCCCCTGGCCATCTGGCTTTTCATCTTCAACGTC
TCTCAACAGATGGGGGGCTTCTACCTGTGCCAGCCGGGGCCCCCCTCTGAGAAGGCCTGGCAGCCTGGCTGGACAGTC
AATGTGGAGGGCAGCGGGGAGCTGTTCCGGTGGAATGTTTCGGACCTAGGTGGCCTGGGCTGTGGCCTGAAGAACAGG
TCCTCAGAGGGCCCCAGCTCCCCTTCCGGGAAGCTCATGAGCCCCAAGCTGTATGTGTGGGCCAAAGACCGCCCTGAG
ATCTGGGAGGGAGAGCCTCCGTGTCTCCCACCGAGGGACAGCCTGAACCAGAGCCTCAGCCAGGACCTCACCATGGCC
CCTGGCTCCACACTCTGGCTGTCCTGTGGGGTACCCCCTGACTCTGTGTCCAGGGGCCCCCTCTCCTGGACCCATGTG
CACCCCAAGGGGCCTAAGTCATTGCTGAGCCTAGAGCTGAAGGACGATCGCCCGGCCAGAGATATGTGGGTAATGGAG
ACGGGTCTGTTGTTGCCCCGGGCCACAGCTCAAGACGCTGGAAAGTATTATTGTCACCGTGGCAACCTGACCATGTCA
TTCCACCTGGAGATCACTGCTCGGCCA
SEQID NO. 236
ATGCCACCTCCTCGCCTCCTCTTCTTCCTCCTCTTCCTCACCCCCATGGAAGTCAGGCCCGAGGAACCTCTAGTGGTG
AAGGTGGAAGAGGGAGATAACGCTGTGCTGCAGTGCCTCAAGGGGACCTCAGATGGCCCCACTCAGCAGCTGACCTGG
TCTCGGGAGTCCCCGCTTAAACCCTTCTTAAAACTCAGCCTGGGGCTGCCAGGCCTGGGAATCCACATGAGGCCCCTG
GCCATCTGGCTTTTCATCTTCAACGTCTCTCAACAGATGGGGGGCTTCTACCTGTGCCAGCCGGGGCCCCCCTCTGAG
AAGGCCTGGCAGCCTGGCTGGACAGTCAATGTGGAGGGCAGCGGGGAGCTGTTCCGGTGGAATGTTTCGGACCTAGGT
GGCCTGGGCTGTGGCCTGAAGAACAGGTCCTCAGAGGGCCCCAGCTCCCCTTCCGGGAAGCTCATGAGCCCCAAGCTG
TATGTGTGGGCCAAAGACCGCCCTGAGATCTGGGAGGGAGAGCCTCCGTGTCTCCCACCGAGGGACAGCCTGAACCAG
AGCCTCAGCCAGGACCTCACCATGGCCCCTGGCTCCACACTCTGGCTGTCCTGTGGGGTACCCCCTGACTCTGTGTCC
AGGGGCCCCCTCTCCTGGACCCATGTGCACCCCAAGGGGCCTAAGTCATTGCTGAGCCTAGAGCTGAAGGACGATCGC
CCGGCCAGAGATATGTGGGTAATGGAGACGGGTCTGTTGTTGCCCCGGGCCACAGCTCAAGACGCTGGAAAGTATTAT
TGTCACCGTGGCAACCTGACCATGTCATTCCACCTGGAGATCACTGCTCGGCCAGGAGGAGGTGGGTCTGGAGGTGGA
GGATCTGGTGGAGGTGGGTCTGACATCCAGATGACCCAGTCTCCATCCTCCCTGTCTGCATCTGTAGGAGACAGAGTC
ACCATCACTTGCAGTGTCAGCTCAAGTGTATCCTCCATTTACTTGCACTGGTATCAGCAGAAACCAGGGAAAGCCCCT
AAGCTCCTGATCTATAGCACATCCAACTTGGCTTCTGGAGTCCCATCAAGGTTCAGTGGCAGTGGATCTGGGACAGAT
TTCACTCTCACCATCAGCAGTCTGCAACCTGAAGATTTTGCAACTTACTACTGTCAAGTCTACAGTGGTTACCCGCTC
ACGTTCGGCGGAGGGACCAAGGTGGAGATCAAACGAACTGTGGCTGCACCATCTGTCTTCATCTTCCCGCCATCTGAT
GAGCAGTTGAAATCTGGAACTGCCTCTGTTGTGTGCCTGCTGAATAACTTCTATCCCAGAGAGGCCAAAGTACAGTGG
AAGGTGGATAACGCCCTCCAATCGGGTAACTCCCAGGAGAGTGTCACAGAGCAGGACAGCAAGGACAGCACCTACAGC
CTCAGCAGCACCCTGACGCTGAGCAAAGCAGACTACGAGAAACACAAAGTCTACGCCTGCGAAGTCACCCATCAGGGC
CTGAGCTCGCCCGTCACAAAGAGCTTCAACAGGGGAGAGTGCT
SEQID NO. 237
ATGCCACCTCCTCGCCTCCTCTTCTTCCTCCTCTTCCTCACCCCCATGGAAGTCAGGCCCGAGGAACCTCTAGTGGTG
AAGGTGGAAGAGGGAGATAACGCTGTGCTGCAGTGCCTCAAGGGGACCTCAGATGGCCCCACTCAGCAGCTGACCTGG
TCTCGGGAGTCCCCGCTTAAACCCTTCTTAAAACTCAGCCTGGGGCTGCCAGGCCTGGGAATCCACATGAGGCCCCTG
GCCATCTGGCTTTTCATCTTCAACGTCTCTCAACAGATGGGGGGCTTCTACCTGTGCCAGCCGGGGCCCCCCTCTGAG
AAGGCCTGGCAGCCTGGCTGGACAGTCAATGTGGAGGGCAGCGGGGAGCTGTTCCGGTGGAATGTTTCGGACCTAGGT
GGCCTGGGCTGTGGCCTGAAGAACAGGTCCTCAGAGGGCCCCAGCTCCCCTTCCGGGAAGCTCATGAGCCCCAAGCTG
TATGTGTGGGCCAAAGACCGCCCTGAGATCTGGGAGGGAGAGCCTCCGTGTCTCCCACCGAGGGACAGCCTGAACCAG
AGCCTCAGCCAGGACCTCACCATGGCCCCTGGCTCCACACTCTGGCTGTCCTGTGGGGTACCCCCTGACTCTGTGTCC
AGGGGCCCCCTCTCCTGGACCCATGTGCACCCCAAGGGGCCTAAGTCATTGCTGAGCCTAGAGCTGAAGGACGATCGC
CCGGCCAGAGATATGTGGGTAATGGAGACGGGTCTGTTGTTGCCCCGGGCCACAGCTCAAGACGCTGGAAAGTATTAT
TGTCACCGTGGCAACCTGACCATGTCATTCCACCTGGAGATCACTGCTCGGCCAGGAGGAGGTGGGTCTGGAGGTGGA
GGATCTGGTGGAGGTGGGTCTCAGGTTCAGCTGGTGCAGTCTGGTGCTGAGGTGAAGAAGCCTGGTGCCTCAGTGAAG
GTCTCCTGCAAGGCTTCTGGTTACACATTCACTGACTACTACATGCACTGGGTGCGTCAGGCCCCTGGTCAAGGTCTT
GAGTGGATGGGTCGTGTTAATCCTAACCGGAGGGGTACTACCTACAACCAGAAATTCGAGGGCCGTGTCACCATGACC
ACAGACACATCCACGAGCACAGCCTACATGGAGCTGCGTAGCCTGCGTTCTGACGACACGGCCGTGTATTACTGTGCG
CGTGCGAACTGGCTTGACTACTGGGGCCAGGGCACCACCGTCACCGTCTCCTCCGCCTCCACCAAGGGCCCATCGGTC
TTCCCGCTAGCGCCCTGCTCCAGGAGCACCTCCGAGAGCACAGCCGCCCTGGGCTGCCTGGTCAAGGACTACTTCCCC
GAACCGGTGACGGTGTCGTGGAACTCAGGCGCCCTGACCAGCGGCGTGCACACCTTCCCGGCTGTCCTACAGTCCTCA
GGACTCTACTCCCTCAGCAGCGTGGTGACCGTGCCCTCCAGCAGCTTGGGCACGAAGACCTACACCTGCAACGTAGAT
CACAAGCCCAGCAACACCAAGGTGGACAAGAGAGTTGAGTCCAAATATGGTCCCCCATGCCCACCCTGCCCAGCACCT
GAGGCCGCCGGGGGACCATCAGTCTTCCTGTTCCCCCCAAAACCCAAGGACACTCTCATGATCTCCCGGACCCCTGAG
GTCACGTGCGTGGTGGTGGACGTGAGCCAGGAAGACCCCGAGGTCCAGTTCAACTGGTACGTGGATGGCGTGGAGGTG
CATAATGCCAAGACAAAGCCGCGGGAGGAGCAGTTCAACAGCACGTACCGTGTGGTCAGCGTCCTCACCGTCCTGCAC
CAGGACTGGCTGAACGGCAAGGAGTACAAGTGCAAGGTCTCCAACAAAGGCCTCCCGTCCTCCATCGAGAAAACCATC
TCCAAAGCCAAAGGGCAGCCCCGAGAGCCACAGGTGTACACCCTGCCCCCATCCCAGGAGGAGATGACCAAGAACCAG
GTCAGCCTGACCTGCCTGGTCAAAGGCTTCTACCCCAGCGACATCGCCGTGGAGTGGGAAAGCAATGGGCAGCCGGAG
AACAACTACAAGACCACGCCTCCCGTGCTGGACTCCGACGGCTCCTTCTTCCTCTACAGCAGGCTAACCGTGGACAAG
AGCAGGTGGCAGGAGGGGAATGTCTTCTCATGCTCCGTGATGCATGAGG
CTCTGCACAACCACTACACACAGAAGAGCCTCTCCCTGTCTCTG
SEQID NO. 238
ATGGAGACAGACACACTCCTGCTATGGGTACTGCTGCTCTGGGTTCCAGGTTCCACTGGTGACATCCAGATGACCCAG
TCTCCATCCTCCCTGTCTGCATCTGTAGGAGACAGAGTCACCATCACTTGCAGTGTCAGCTCAAGTGTATCCTCCATT
TACTTGCACTGGTATCAGCAGAAACCAGGGAAAGCCCCTAAGCTCCTGATCTATAGCACATCCAACTTGGCTTCTGGA
GTCCCATCAAGGTTCAGTGGCAGTGGATCTGGGACAGATTTCACTCTCACCATCAGCAGTCTGCAACCTGAAGATTTT
GCAACTTACTACTGTCAAGTCTACAGTGGTTACCCGCTCACGTTCGGCGGAGGGACCAAGGTGGAGATCAAACGAACT
GTGGCTGCACCATCTGTCTTCATCTTCCCGCCATCTGATGAGCAGTTGAAATCTGGAACTGCCTCTGTTGTGTGCCTG
CTGAATAACTTCTATCCCAGAGAGGCCAAAGTACAGTGGAAGGTGGATAACGCCCTCCAATCGGGTAACTCCCAGGAG
AGTGTCACAGAGCAGGACAGCAAGGACAGCACCTACAGCCTCAGCAGCACCCTGACGCTGAGCAAAGCAGACTACGAG
AAACACAAAGTCTACGCCTGCGAAGTCACCCATCAGGGCCTGAGCTCGCCCGTCACAAAGAGCTTCAACAGGGGAGAG
TGCGACAAAACTCACACATCGCCACCGTCCCCAGCACCTGAAGCCGCGGGGGGACCGTCACCCGAGGAACCTCTAGTG
GTGAAGGTGGAAGAGGGAGATAACGCTGTGCTGCAGTGCCTCAAGGGGACCTCAGATGGCCCCACTCAGCAGCTGACC
TGGTCTCGGGAGTCCCCGCTTAAACCCTTCTTAAAACTCAGCCTGGGGCTGCCAGGCCTGGGAATCCACATGAGGCCC
CTGGCCATCTGGCTTTTCATCTTCAACGTCTCTCAACAGATGGGGGGCTTCTACCTGTGCCAGCCGGGGCCCCCCTCT
GAGAAGGCCTGGCAGCCTGGCTGGACAGTCAATGTGGAGGGCAGCGGGGAGCTGTTCCGGTGGAATGTTTCGGACCTA
GGTGGCCTGGGCTGTGGCCTGAAGAACAGGTCCTCAGAGGGCCCCAGCTCCCCTTCCGGGAAGCTCATGAGCCCCAAG
CTGTATGTGTGGGCCAAAGACCGCCCTGAGATCTGGGAGGGAGAGCCTCCGTGTCTCCCACCGAGGGACAGCCTGAAC
CAGAGCCTCAGCCAGGACCTCACCATGGCCCCTGGCTCCACACTCTGGCTGTCCTGTGGGGTACCCCCTGACTCTGTG
TCCAGGGGCCCCCTCTCCTGGACCCATGTGCACCCCAAGGGGCCTAAGTCATTGCTGAGCCTAGAGCTGAAGGACGAT
CGCCCGGCCAGAGATATGTGGGTAATGGAGACGGGTCTGTTGTTGCCCCGGGCCACAGCTCAAGACGCTGGAAAGTAT
TATTGTCACCGTGGCAACCTGACCATGTCATTCCACCTGGAGATCACTGCTCGGCCA
SEQID NO. 239
ATGGAGTTTGGGCTGAGCTGGGTTTTCCTCGTTGCTCTTTTTAGAGGTGTCCAGTGTCAGGTTCAGCTGGTGCAGTCT
GGTGCTGAGGTGAAGAAGCCTGGTGCCTCAGTGAAGGTCTCCTGCAAGGCTTCTGGTTACACATTCACTGACTACTAC
ATGCACTGGGTGCGTCAGGCCCCTGGTCAAGGTCTTGAGTGGATGGGTCGTGTTAATCCTAACCGGAGGGGTACTACC
TACAACCAGAAATTCGAGGGCCGTGTCACCATGACCACAGACACATCCACGAGCACAGCCTACATGGAGCTGCGTAGC
CTGCGTTCTGACGACACGGCCGTGTATTACTGTGCGCGTGCGAACTGGCTTGACTACTGGGGCCAGGGCACCACCGTC
ACCGTCTCCTCCGCCTCCACCAAGGGCCCATCGGTCTTCCCGCTAGCGCCCTGCTCCAGGAGCACCTCCGAGAGCACA
GCCGCCCTGGGCTGCCTGGTCAAGGACTACTTCCCCGAACCGGTGACGGTGTCGTGGAACTCAGGCGCCCTGACCAGC
GGCGTGCACACCTTCCCGGCTGTCCTACAGTCCTCAGGACTCTACTCCCTCAGCAGCGTGGTGACCGTGCCCTCCAGC
AGCTTGGGCACGAAGACCTACACCTGCAACGTAGATCACAAGCCCAGCAACACCAAGGTGGACAAGAGAGTTGAGTCC
AAATATGGTCCCCCATGCCCACCCTGCCCAGCACCTGAGGCCGCCGGGGGACCATCAGTCTTCCTGTTCCCCCCAAAA
CCCAAGGACACTCTCATGATCTCCCGGACCCCTGAGGTCACGTGCGTGGTGGTGGACGTGAGCCAGGAAGACCCCGAG
GTCCAGTTCAACTGGTACGTGGATGGCGTGGAGGTGCATAATGCCAAGACAAAGCCGCGGGAGGAGCAGTTCAACAGC
ACGTACCGTGTGGTCAGCGTCCTCACCGTCCTGCACCAGGACTGGCTGAACGGCAAGGAGTACAAGTGCAAGGTCTCC
AACAAAGGCCTCCCGTCCTCCATCGAGAAAACCATCTCCAAAGCCAAAGGGCAGCCCCGAGAGCCACAGGTGTACACC
CTGCCCCCATCCCAGGAGGAGATGACCAAGAACCAGGTCAGCCTGACCTGCCTGGTCAAAGGCTTCTACCCCAGCGAC
ATCGCCGTGGAGTGGGAAAGCAATGGGCAGCCGGAGAACAACTACAAGACCACGCCTCCCGTGCTGGACTCCGACGGC
TCCTTCTTCCTCTACAGCAGGCTAACCGTGGACAAGAGCAGGTGGCAGGAGGGGAATGTCTTCTCATGCTCCGTGATG
CATGAGGCTCTGCACAACCACTACACACAGAAGAGCCTCTCCCTGTCTCTGGGTGGTGGAGGTGGGTCTGGAGGTGGA
GGATCTGGTGGAGGTGGGTCTCCCGAGGAACCTCTAGTGGTGAAGGTGGAAGAGGGAGATAACGCTGTGCTGCAGTGC
CTCAAGGGGACCTCAGATGGCCCCACTCAGCAGCTGACCTGGTCTCGGGAGTCCCCGCTTAAACCCTTCTTAAAACTC
AGCCTGGGGCTGCCAGGCCTGGGAATCCACATGAGGCCCCTGGCCATCTGGCTTTTCATCTTCAACGTCTCTCAACAG
ATGGGGGGCTTCTACCTGTGCCAGCCGGGGCCCCCCTCTGAGAAGGCCTGGCAGCCTGGCTGGACAGTCAATGTGGAG
GGCAGCGGGGAGCTGTTCCGGTGGAATGTTTCGGACCTAGGTGGCCTGGGCTGTGGCCTGAAGAACAGGTCCTCAGAG
GGCCCCAGCTCCCCTTCCGGGAAGCTCATGAGCCCCAAGCTGTATGTGTGGGCCAAAGACCGCCCTGAGATCTGGGAG
GGAGAGCCTCCGTGTCTCCCACCGAGGGACAGCCTGAACCAGAGCCTCAGCCAGGACCTCACCATGGCCCCTGGCTCC
ACACTCTGGCTGTCCTGTGGGGTACCCCCTGACTCTGTGTCCAGGGGCCCCCTCTCCTGGACCCATGTGCACCCCAAG
GGGCCTAAGTCATTGCTGAGCCTAGAGCTGAAGGACGATCGCCCGGCCAGAGATATGTGGGTAATGGAGACGGGTCTG
TTGTTGCCCCGGGCCACAGCTCAAGACGCTGGAAAGTATTATTGTCACCGTGGCAACCTGACCATGTCATTCCACCTG
GAGATCACTGCTCGGCCA
SEQID NO. 240
ATGGAGTTTGGGCTGAGCTGGGTTTTCCTCGTTGCTCTTTTTAGAGGTGTCCAGTGTGAGGTGCAGCTGGTGGAGTCT
GGTGGTGGTCTTGTTCAACCTGGTGGTTCTCTTCGTCTTTCTTGTGCTGCTTCTGGTTTTAATATTAAAGATACTTAT
ATTCATTGGGTTCGTCAAGCTCCTGGTAAAGGTCTTGAATGGGTTGCTCGTATTTATCCTACTAATGGTTATACTCGT
TATGCTGATTCTGTTAAAGGTCGTTTTACTATTTCTGCTGATACTTCTAAAAATACTGCTTATCTTCAAATGAACTCT
CTTCGTGCTGAAGATACTGCTGTTTATTATTGTTCTCGTTGGGGTGGTGATGGTTTTTATGCTATGGATTATTGGGGT
CAAGGTACTCTTGTCACCGTCTCCTCAGCTAGCACCGGGGGAGGTGGGTCTGGAGGTGGAGGATCTGGTGGAGGTGGG
TCTGACATCCAGATGACCCAGTCTCCTTCTTCTCTTTCTGCTTCTGTTGGTGATCGTGTTACTATTACTTGTCGTGCT
TCTCAAGATGTTAATACTGCTGTTGCTTGGTATCAACAAAAACCTGGTAAAGCTCCTAAACTTCTTATTTATTCTGCT
TCTTTTCTTTATTCTGGTGTTCCTTCTCGTTTTTCTGGTTCTCGTTCTGGTACTGATTTTACTCTTACTATTTCTTCT
CTTCAACCTGAAGATTTTGCTACTTATTATTGTCAACAACATTATACTACTCCTCCTACTTTTGGTCAAGGTACCAAG
GTGGAGATCAAACGTACGGACAAAACTCACACATCGCCACCGTCCCCAGCACCTGAAGCCGCGGGGGGACCGTCACCC
GAGGAACCTCTAGTGGTGAAGGTGGAAGAGGGAGATAACGCTGTGCTGCAGTGCCTCAAGGGGACCTCAGATGGCCCC
ACTCAGCAGCTGACCTGGTCTCGGGAGTCCCCGCTTAAACCCTTCTTAAAACTCAGCCTGGGGCTGCCAGGCCTGGGA
ATCCACATGAGGCCCCTGGCCATCTGGCTTTTCATCTTCAACGTCTCTCAACAGATGGGGGGCTTCTACCTGTGCCAG
CCGGGGCCCCCCTCTGAGAAGGCCTGGCAGCCTGGCTGGACAGTCAATGTGGAGGGCAGCGGGGAGCTGTTCCGGTGG
AATGTTTCGGACCTAGGTGGCCTGGGCTGTGGCCTGAAGAACAGGTCCTCAGAGGGCCCCAGCTCCCCTTCCGGGAAG
CTCATGAGCCCCAAGCTGTATGTGTGGGCCAAAGACCGCCCTGAGATCTGGGAGGGAGAGCCTCCGTGTCTCCCACCG
AGGGACAGCCTGAACCAGAGCCTCAGCCAGGACCTCACCATGGCCCCTGGCTCCACACTCTGGCTGTCCTGTGGGGTA
CCCCCTGACTCTGTGTCCAGGGGCCCCCTCTCCTGGACCCATGTGCACCCCAAGGGGCCTAAGTCATTGCTGAGCCTA
GAGCTGAAGGACGATCGCCCGGCCAGAGATATGTGGGTAATGGAGACGGGTCTGTTGTTGCCCCGGGCCACAGCTCAA
GACGCTGGAAAGTATTATTGTCACCGTGGCAACCTGACCATGTCATTCCACCTGGAGATCACTGCTCGGCCATCTAGA
GGGCCCCATCATCACCATCACCAT
SEQID NO. 241
ATGGAGTTTGGGCTGAGCTGGGTTTTCCTCGTTGCTCTTTTTAGAGGTGTCCAGTGTGAGGTGCAGCTGGTGGAGTCT
GGTGGTGGTCTTGTTCAACCTGGTGGTTCTCTTCGTCTTTCTTGTGCTGCTTCTGGTTTTAATATTAAAGATACTTAT
ATTCATTGGGTTCGTCAAGCTCCTGGTAAAGGTCTTGAATGGGTTGCTCGTATTTATCCTACTAATGGTTATACTCGT
TATGCTGATTCTGTTAAAGGTCGTTTTACTATTTCTGCTGATACTTCTAAAAATACTGCTTATCTTCAAATGAACTCT
CTTCGTGCTGAAGATACTGCTGTTTATTATTGTTCTCGTTGGGGTGGTGATGGTTTTTATGCTATGGATTATTGGGGT
CAAGGTACTCTTGTCACCGTCTCCTCAGCTAGCACCGGGGGAGGTGGGTCTGGAGGTGGAGGATCTGGTGGAGGTGGG
TCTGACATCCAGATGACCCAGTCTCCTTCTTCTCTTTCTGCTTCTGTTGGTGATCGTGTTACTATTACTTGTCGTGCT
TCTCAAGATGTTAATACTGCTGTTGCTTGGTATCAACAAAAACCTGGTAAAGCTCCTAAACTTCTTATTTATTCTGCT
TCTTTTCTTTATTCTGGTGTTCCTTCTCGTTTTTCTGGTTCTCGTTCTGGTACTGATTTTACTCTTACTATTTCTTCT
CTTCAACCTGAAGATTTTGCTACTTATTATTGTCAACAACATTATACTACTCCTCCTACTTTTGGTCAAGGTACCAAG
GTGGAGATCAAACGTACGGACAAAACTCACACATCGCCACCGTCCCCAGCACCTGAAGCCGCGGGGGGACCGTCACCC
GAGGAACCTCTAGTGGTGAAGGTGGAAGAGGGAGATAACGCTGTGCTGCAGTGCCTCAAGGGGACCTCAGATGGCCCC
ACTCAGCAGCTGACCTGGTCTCGGGAGTCCCCGCTTAAACCCTTCTTAAAACTCAGCCTGGGGCTGCCAGGCCTGGGA
ATCCACATGAGGCCCCTGGCCATCTGGCTTTTCATCTTCAACGTCTCTCAACAGATGGGGGGCTTCTACCTGTGCCAG
CCGGGGCCCCCCTCTGAGAAGGCCTGGCAGCCTGGCTGGACAGTCAATGTGGAGGGCAGCGGGGAGCTGTTCCGGTGG
AATGTTTCGGACCTAGGTGGCCTGGGCTGTGGCCTGAAGAACAGGTCCTCAGAGGGCCCCAGCTCCCCTTCCGGGAAG
CTCATGAGCCCCAAGCTGTATGTGTGGGCCAAAGACCGCCCTGAGATCTGGGAGGGAGAGCCTCCGTGTCTCCCACCG
AGGGACAGCCTGAACCAGAGCCTCAGCCAGGACCTCACCATGGCCCCTGGCTCCACACTCTGGCTGTCCTGTGGGGTA
CCCCCTGACTCTGTGTCCAGGGGCCCCCTCTCCTGGACCCATGTGCACCCCAAGGGGCCTAAGTCATTGCTGAGCCTA
GAGCTGAAGGACGATCGCCCGGCCAGAGATATGTGGGTAATGGAGACGGGTCTGTTGTTGCCCCGGGCCACAGCTCAA
GACGCTGGAAAGTATTATTGTCACCGTGGCAACCTGACCATGTCATTCCACCTGGAGATCACTGCTCGGCCAGACAAA
ACTCACACATGCCCACCGTGCCCAGCACCTGAACTCCTGGGGGGACCGTCAGTCTTCCTCTTCCCCCCAAAACCCAAG
GACACCCTCATGATCTCCCGGACCCCTGAGGTCACATGCGTGGTGGTGGACGTGAGCCACGAAGACCCTGAGGTCAAG
TTCAACTGGTACGTGGACGGCGTGGAGGTGCATAATGCCAAGACAAAGCCGCGGGAGGAGCAGTACAACAGCACGTAC
CGTGTGGTCAGCGTCCTCACCGTCCTGCACCAGGACTGGCTGAATGGCAAGGAGTACAAGTGCAAGGTCTCCAACAAA
GCCCTCCCAGCCCCCATCGAGAAAACCATCTCCAAAGCCAAAGGGCAGCCCCGAGAACCACAGGTGTACACCCTGCCC
CCATCCCGGGAGGAGATGACCAAGAACCAGGTCAGCCTGACCTGCCTGGTCAAAGGCTTCTATCCCAGCGACATCGCC
GTGGAGTGGGAGAGCAATGGGCAGCCGGAGAACAACTACAAGACCACGCCTCCCGTGCTGGACTCCGACGGCTCCTTC
TTCCTCTACAGCAAGCTCACCGTGGACAAGAGCAGGTGGCAGCAGGGGAACGTCTTCTCATGCTCCGTGATGCACGAG
GCTCTGCACAACCACTACACGCAGAAGAGCCTCTCCCTGTCTCCGGGT
SEQID NO. 242
ATGCCACCTCCTCGCCTCCTCTTCTTCCTCCTCTTCCTCACCCCCATGGAAGTCAGGCCCGAGGAACCTCTAGTGGTG
AAGGTGGAAGAGGGAGATAACGCTGTGCTGCAGTGCCTCAAGGGGACCTCAGATGGCCCCACTCAGCAGCTGACCTGG
TCTCGGGAGTCCCCGCTTAAACCCTTCTTAAAACTCAGCCTGGGGCTGCCAGGCCTGGGAATCCACATGAGGCCCCTG
GCCATCTGGCTTTTCATCTTCAACGTCTCTCAACAGATGGGGGGCTTCTACCTGTGCCAGCCGGGGCCCCCCTCTGAG
AAGGCCTGGCAGCCTGGCTGGACAGTCAATGTGGAGGGCAGCGGGGAGCTGTTCCGGTGGAATGTTTCGGACCTAGGT
GGCCTGGGCTGTGGCCTGAAGAACAGGTCCTCAGAGGGCCCCAGCTCCCCTTCCGGGAAGCTCATGAGCCCCAAGCTG
TATGTGTGGGCCAAAGACCGCCCTGAGATCTGGGAGGGAGAGCCTCCGTGTCTCCCACCGAGGGACAGCCTGAACCAG
AGCCTCAGCCAGGACCTCACCATGGCCCCTGGCTCCACACTCTGGCTGTCCTGTGGGGTACCCCCTGACTCTGTGTCC
AGGGGCCCCCTCTCCTGGACCCATGTGCACCCCAAGGGGCCTAAGTCATTGCTGAGCCTAGAGCTGAAGGACGATCGC
CCGGCCAGAGATATGTGGGTAATGGAGACGGGTCTGTTGTTGCCCCGGGCCACAGCTCAAGACGCTGGAAAGTATTAT
TGTCACCGTGGCAACCTGACCATGTCATTCCACCTGGAGATCACTGCTCGGCCAGGGGGAGGTGGGTCTGGAGGTGGA
GGATCTGGTGGAGGTGGGTCTGGTGGAGGTGGGTCTGAGGTGCAGCTGGTGGAGTCTGGTGGTGGTCTTGTTCAACCT
GGTGGTTCTCTTCGTCTTTCTTGTGCTGCTTCTGGTTTTAATATTAAAGATACTTATATTCATTGGGTTCGTCAAGCT
CCTGGTAAAGGTCTTGAATGGGTTGCTCGTATTTATCCTACTAATGGTTATACTCGTTATGCTGATTCTGTTAAAGGT
CGTTTTACTATTTCTGCTGATACTTCTAAAAATACTGCTTATCTTCAAATGAACTCTCTTCGTGCTGAAGATACTGCT
GTTTATTATTGTTCTCGTTGGGGTGGTGATGGTTTTTATGCTATGGATTATTGGGGTCAAGGTACTCTTGTCACCGTC
TCCTCAGCTAGCACCGGGGGAGGTGGGTCTGGAGGTGGAGGATCTGGTGGAGGTGGGTCTGACATCCAGATGACCCAG
TCTCCTTCTTCTCTTTCTGCTTCTGTTGGTGATCGTGTTACTATTACTTGTCGTGCTTCTCAAGATGTTAATACTGCT
GTTGCTTGGTATCAACAAAAACCTGGTAAAGCTCCTAAACTTCTTATTTATTCTGCTTCTTTTCTTTATTCTGGTGTT
CCTTCTCGTTTTTCTGGTTCTCGTTCTGGTACTGATTTTACTCTTACTATTTCTTCTCTTCAACCTGAAGATTTTGCT
ACTTATTATTGTCAACAACATTATACTACTCCTCCTACTTTTGGTCAAGGTACCAAGGTGGAGATCAAACGTACGTCT
AGAGGGCCCCATCATCACCATCACCAT
SEQID NO. 243
ATGCCACCTCCTCGCCTCCTCTTCTTCCTCCTCTTCCTCACCCCCATGGAAGTCAGGCCCGAGGAACCTCTAGTGGTG
AAGGTGGAAGAGGGAGATAACGCTGTGCTGCAGTGCCTCAAGGGGACCTCAGATGGCCCCACTCAGCAGCTGACCTGG
TCTCGGGAGTCCCCGCTTAAACCCTTCTTAAAACTCAGCCTGGGGCTGCCAGGCCTGGGAATCCACATGAGGCCCCTG
GCCATCTGGCTTTTCATCTTCAACGTCTCTCAACAGATGGGGGGCTTCTACCTGTGCCAGCCGGGGCCCCCCTCTGAG
AAGGCCTGGCAGCCTGGCTGGACAGTCAATGTGGAGGGCAGCGGGGAGCTGTTCCGGTGGAATGTTTCGGACCTAGGT
GGCCTGGGCTGTGGCCTGAAGAACAGGTCCTCAGAGGGCCCCAGCTCCCCTTCCGGGAAGCTCATGAGCCCCAAGCTG
TATGTGTGGGCCAAAGACCGCCCTGAGATCTGGGAGGGAGAGCCTCCGTGTCTCCCACCGAGGGACAGCCTGAACCAG
AGCCTCAGCCAGGACCTCACCATGGCCCCTGGCTCCACACTCTGGCTGTCCTGTGGGGTACCCCCTGACTCTGTGTCC
AGGGGCCCCCTCTCCTGGACCCATGTGCACCCCAAGGGGCCTAAGTCATTGCTGAGCCTAGAGCTGAAGGACGATCGC
CCGGCCAGAGATATGTGGGTAATGGAGACGGGTCTGTTGTTGCCCCGGGCCACAGCTCAAGACGCTGGAAAGTATTAT
TGTCACCGTGGCAACCTGACCATGTCATTCCACCTGGAGATCACTGCTCGGCCAGGGGGAGGTGGGTCTGGAGGTGGA
GGATCTGGTGGAGGTGGGTCTGGTGGAGGTGGGTCTGAGGTGCAGCTGGTGGAGTCTGGTGGTGGTCTTGTTCAACCT
GGTGGTTCTCTTCGTCTTTCTTGTGCTGCTTCTGGTTTTAATATTAAAGATACTTATATTCATTGGGTTCGTCAAGCT
CCTGGTAAAGGTCTTGAATGGGTTGCTCGTATTTATCCTACTAATGGTTATACTCGTTATGCTGATTCTGTTAAAGGT
CGTTTTACTATTTCTGCTGATACTTCTAAAAATACTGCTTATCTTCAAATGAACTCTCTTCGTGCTGAAGATACTGCT
GTTTATTATTGTTCTCGTTGGGGTGGTGATGGTTTTTATGCTATGGATTATTGGGGTCAAGGTACTCTTGTCACCGTC
TCCTCAGCTAGCACCGGGGGAGGTGGGTCTGGAGGTGGAGGATCTGGTGGAGGTGGGTCTGACATCCAGATGACCCAG
TCTCCTTCTTCTCTTTCTGCTTCTGTTGGTGATCGTGTTACTATTACTTGTCGTGCTTCTCAAGATGTTAATACTGCT
GTTGCTTGGTATCAACAAAAACCTGGTAAAGCTCCTAAACTTCTTATTTATTCTGCTTCTTTTCTTTATTCTGGTGTT
CCTTCTCGTTTTTCTGGTTCTCGTTCTGGTACTGATTTTACTCTTACTATTTCTTCTCTTCAACCTGAAGATTTTGCT
ACTTATTATTGTCAACAACATTATACTACTCCTCCTACTTTTGGTCAAGGTACCAAGGTGGAGATCAAACGTACGGAC
AAAACTCACACATGCCCACCGTGCCCAGCACCTGAACTCCTGGGGGGACCGTCAGTCTTCCTCTTCCCCCCAAAACCC
AAGGACACCCTCATGATCTCCCGGACCCCTGAGGTCACATGCGTGGTGGTGGACGTGAGCCACGAAGACCCTGAGGTC
AAGTTCAACTGGTACGTGGACGGCGTGGAGGTGCATAATGCCAAGACAAAGCCGCGGGAGGAGCAGTACAACAGCACG
TACCGTGTGGTCAGCGTCCTCACCGTCCTGCACCAGGACTGGCTGAATGGCAAGGAGTACAAGTGCAAGGTCTCCAAC
AAAGCCCTCCCAGCCCCCATCGAGAAAACCATCTCCAAAGCCAAAGGGCAGCCCCGAGAACCACAGGTGTACACCCTG
CCCCCATCCCGGGAGGAGATGACCAAGAACCAGGTCAGCCTGACCTGCCTGGTCAAAGGCTTCTATCCCAGCGACATC
GCCGTGGAGTGGGAGAGCAATGGGCAGCCGGAGAACAACTACAAGACCACGCCTCCCGTGCTGGACTCCGACGGCTCC
TTCTTCCTCTACAGCAAGCTCACCGTGGACAAGAGCAGGTGGCAGCAGGGGAACGTCTTCTCATGCTCCGTGATGCAC
GAGGCTCTGCACAACCACTACACGCAGAAGAGCCTCTCCCTGTCTCCGGGT
SEQID NO. 246
AAGCTTAATTTAAGGCAGGATGTCTCAGAGTCTGGGAAAATCCCACTTTCCTCCTGCTACACCTTACAGTTGTGAGAA
AGCACATTTCAGACAACAGGGAAAACCCATACTTCACCACAACAACACACTATACATTGTCTGGTCCACTGGAGCATA
AATTAAAGAGAAACAATGTAGTCAAGCAAGTAGGCGGCAAGAGGAAGGGGGCGGAGACATCATCAGGGAGTATAAACT
CTGAGATGCCTCAGAGCCTCACAGACTCAACAAGAGCTCCAGCAAAGACTTTCACTGTAGCTTGACTTGACCTGAGAT
TAACTAGGGAATCTTGAGAATAAAGAAGCTTAACTAGTTAGCGGACCGACGCGTACGCGGCCGCTCGAGATGGAGAGC
GACGAGAGCGGCCTGCCCGCCATGGAGATCGAGTGCCGCATCACCGGCACCCTGAACGGCGTGGAGTTCGAGCTGGTG
GGCGGCGGAGAGGGCACCCCCGAGCAGGGCCGCATGACCAACAAGATGAAGAGCACCAAAGGCGCCCTGACCTTCAGC
CCCTACCTGCTGAGCCACGTGATGGGCTACGGCTTCTACCACTTCGGCACCTACCCCAGCGGCTACGAGAACCCCTTC
CTGCACGCCATCAACAACGGCGGCTACACCAACACCCGCATCGAGAAGTACGAGGACGGCGGCGTGCTGCACGTGAGC
TTCAGCTACCGCTACGAGGCCGGCCGCGTGATCGGCGACTTCAAGGTGATGGGCACCGGCTTCCCCGAGGACAGCGTG
ATCTTCACCGACAAGATCATCCGCAGCAACGCCACCGTGGAGCACCTGCACCCCATGGGCGATAACGATCTGGATGGC
AGCTTCACCCGCACCTTCAGCCTGCGCGACGGCGGCTACTACAGCTCCGTGGTGGACAGCCACATGCACTTCAAGAGC
GCCATCCACCCCAGCATCCTGCAGAACGGGGGCCCCATGTTCGCCTTCCGCCGCGTGGAGGAGGATCACAGCAACACC
GAGCTGGGCATCGTGGAGTACCAGCACGCCTTCAAGACCCCGGATGCAGATGCCGGTGAAGAAAGAGTT
SEQID NO. 247
AAGCTTTAACGAAGACAGGGCCATGTAGAGGGCCCCAGGGAGTGAAAGGGCCTCCAGGACCTCCAGGTATGGAATACA
GGGGACGTTTAAGAAGATATGGCCACACACTGGGGCCCTGAGAAGTGAGAGCTTCATGAAAAAAATCAGGGACCCCAG
AGTTCCTTGGAAGCCAAGACTGAAACCAGCATTATGAGTCTCCGGGTCAGAATGAAAGAAGAAGGCCTGCCCCAGTGG
GGTCTGTGAATTCCCGGGGGTGATTTCACTCCCCGGGGCTGTCCCAGGCTTGTCCCTGCTACCCCCACCCAGCCTTTC
CTGAGGCCTCAAGCCTGCCACCAAGCCCCCAGCTCCTTCTCCCCGCAGGGACCCAAACACAGGCCTCGGGACTCAACA
CAGCTTTTCCCTCCAACCCCGTTTTCTCTCCCTCAAGGACTCAGCTTTCTGAGGCCCCTCCCAGTTCTAGTTCTATCT
TTTTCCTGCATCCTGTCTGGAAGTTAGAAGGAAACAGACCACAGACCTGGTCCCCAAAAGAAATGGAGGCAATAGGTT
TTGAGGGGCATGGGGACGGGGTTCAGCCTCCAGGGTCCTACACACAAATCAGTCAGTGGCCCAGAAGACCCCCTCGGA
ATCGGAGCAGGGAGGATGGGGAGTGTGAGGGGTATCCTTGATGCTTGTGTGTCCCCAACTTTCCAAATCCCCGCCCCC
GCGATGGAGAAGAAACCGAGACAGAAGGTGCAGGGCCCACTACCGCTTCCTCCAGATGAGCTCATGGGTTTCTCCACC
AAGGAAGTTTTCCGCTGGTTGAATGATTCTTTCCCCGCCCTCCTCTCGCCCCAGGGACATATAAAGGCAGTTGTTGGC
ACACCCAGCCAGCAGACGCTCCCTCAGCAAGGACAGCAGAGGACCAGCTAAGAGGGAGAGAAGCAACTACAGACCCCC
CCTGAAAACAACCCTCAGACGCCACATCCCCTGACAAGCTGCCAGGCAGGTTCTCTTCCTCTCACATACTGACCCACG
GCTCCACCCTCTCTCCCCTGGAAAGGACACAAGCTTAACTAGTTAGCGGACCGACGCGTACGCGGCCGCTCGAGATGG
AGAGCGACGAGAGCGGCCTGCCCGCCATGGAGATCGAGTGCCGCATCACCGGCACCCTGAACGGCGTGGAGTTCGAGC
TGGTGGGCGGCGGAGAGGGCACCCCCGAGCAGGGCCGCATGACCAACAAGATGAAGAGCACCAAAGGCGCCCTGACCT
TCAGCCCCTACCTGCTGAGCCACGTGATGGGCTACGGCTTCTACCACTTCGGCACCTACCCCAGCGGCTACGAGAACC
CCTTCCTGCACGCCATCAACAACGGCGGCTACACCAACACCCGCATCGAGAAGTACGAGGACGGCGGCGTGCTGCACG
TGAGCTTCAGCTACCGCTACGAGGCCGGCCGCGTGATCGGCGACTTCAAGGTGATGGGCACCGGCTTCCCCGAGGACA
GCGTGATCTTCACCGACAAGATCATCCGCAGCAACGCCACCGTGGAGCACCTGCACCCCATGGGCGATAACGATCTGG
ATGGCAGCTTCACCCGCACCTTCAGCCTGCGCGACGGCGGCTACTACAGCTCCGTGGTGGACAGCCACATGCACTTCA
AGAGCGCCATCCACCCCAGCATCCTGCAGAACGGGGGCCCCATGTTCGCCTTCCGCCGCGTGGAGGAGGATCACAGCA
ACACCGAGCTGGGCATCGTGGAGTACCAGCACGCCTTCAAGACCCCGGATGCAGATGCCGGTGAAGAAAGAGTT
SEQID NO. 248
AAGCTTGGGAGAAGCTAGACTTAAAATCTTCCATTGCAGCTGTAAACACATCTGGACAATAGTCTGTTTTCTGCATTT
GTGAATCCCACACCCATGGAACTATGAATCGTGCATCAGAGTTATTTAAAACCACCGTGCATGGAGTGAACCAATACC
GAGGTGTTTGCTTATCATTTTCCTTTGAGCACACAGCACAGCCTTGAACTCAGTGACACTCCTAAGAGGGCTCTAGGG
TCAGGCCAACTTAGATGAGATGCTAGTCTTTAGCTAAAGATGCCCTTCCACCCCCGTTGCACGACCTTGCTTCTCAGT
CTTTGTTGAGTCTTCTGGGGGAGAATCCCCCTAGAGGACTCAGTTTACAAAACCCTAAGTGAGACCACTGCCAAGAAG
TGCTTGCTCACCCCTCCTGCCGCGGCAGGGAATCCCCCTTTCCTTGTACAGGCAAAACACAAAAAAGGACTCATAAGT
GAAGCCTGATCCTTCTCACCAAACACTGCCCACACCTCCTAGTAATTGAACTTGAAAAAAAAAACTGGTTTGAAAAAT
TACCGCAAACCATATTGTCATAAAAAAAAAAAAAAACACTTCCTATATGAGATCACAGAACAGAGTAGGCACAAGTTC
CTGCTGAGCAGATCAGCCTAATGCTTAAATAGAACAACTCCTGGCTGTCATTGACATTGTCTAAAAGCCAAGATGACA
GACTGAGAGGCCTGAGCCCTTGTTCTGGCATTCTCCCAGGAAGATGCAGTAAAGGGGTTGACCCAATATACAAGCTTA
ACTAGTTAGCGGACCGACGCGTACGCGGCCGCTCGAGATGGAGAGCGACGAGAGCGGCCTGCCCGCCATGGAGATCGA
GTGCCGCATCACCGGCACCCTGAACGGCGTGGAGTTCGAGCTGGTGGGCGGCGGAGAGGGCACCCCCGAGCAGGGCCG
CATGACCAACAAGATGAAGAGCACCAAAGGCGCCCTGACCTTCAGCCCCTACCTGCTGAGCCACGTGATGGGCTACGG
CTTCTACCACTTCGGCACCTACCCCAGCGGCTACGAGAACCCCTTCCTGCACGCCATCAACAACGGCGGCTACACCAA
CACCCGCATCGAGAAGTACGAGGACGGCGGCGTGCTGCACGTGAGCTTCAGCTACCGCTACGAGGCCGGCCGCGTGAT
CGGCGACTTCAAGGTGATGGGCACCGGCTTCCCCGAGGACAGCGTGATCTTCACCGACAAGATCATCCGCAGCAACGC
CACCGTGGAGCACCTGCACCCCATGGGCGATAACGATCTGGATGGCAGCTTCACCCGCACCTTCAGCCTGCGCGACGG
CGGCTACTACAGCTCCGTGGTGGACAGCCACATGCACTTCAAGAGCGCCATCCACCCCAGCATCCTGCAGAACGGGGG
CCCCATGTTCGCCTTCCGCCGCGTGGAGGAGGATCACAGCAACACCGAGCTGGGCATCGTGGAGTACCAGCACGCCTT
CAAGACCCCGGATGCAGATGCCGGTGAAGAAAGAGTT
SEQID NO. 249
AAGCTTGATATCGAATTAGGAGGAAAACTGTTTCATACAGAAGGCGTCAATTAGGAGGAAAAACTGTTTCATACAGAA
GGCGTCAATTAGGAGGAAAAACTGTTTCATACAGAAGGCGTCAATTGGTCCCATCGAATTAGGAGGAAAAACTGTTTC
ATACAGAAGGCGTCAATTAGGAGGAAAAACTGTTTCATACAGAAGGCGTCAATTAGGAGGAAAAACTGTTTCATACAG
AAGGCGTCAATTGGTCCCGGGACATTTTGACACCCCCATAATATTTTTCCAGAATTAACAGTATAAATTGCATCTCTT
GTTCAAGAGTTCCCTATCACTCTCTTTAATCACTACTCACAGTAACCTCAACTCCTGAAGCTTAACTAGTTAGCGGAC
CGACGCGTACGCGGCCGCTCGAGATGGAGAGCGACGAGAGCGGCCTGCCCGCCATGGAGATCGAGTGCCGCATCACCG
GCACCCTGAACGGCGTGGAGTTCGAGCTGGTGGGCGGCGGAGAGGGCACCCCCGAGCAGGGCCGCATGACCAACAAGA
TGAAGAGCACCAAAGGCGCCCTGACCTTCAGCCCCTACCTGCTGAGCCACGTGATGGGCTACGGCTTCTACCACTTCG
GCACCTACCCCAGCGGCTACGAGAACCCCTTCCTGCACGCCATCAACAACGGCGGCTACACCAACACCCGCATCGAGA
AGTACGAGGACGGCGGCGTGCTGCACGTGAGCTTCAGCTACCGCTACGAGGCCGGCCGCGTGATCGGCGACTTCAAGG
TGATGGGCACCGGCTTCCCCGAGGACAGCGTGATCTTCACCGACAAGATCATCCGCAGCAACGCCACCGTGGAGCACC
TGCACCCCATGGGCGATAACGATCTGGATGGCAGCTTCACCCGCACCTTCAGCCTGCGCGACGGCGGCTACTACAGCT
CCGTGGTGGACAGCCACATGCACTTCAAGAGCGCCATCCACCCCAGCATCCTGCAGAACGGGGGCCCCATGTTCGCCT
TCCGCCGCGTGGAGGAGGATCACAGCAACACCGAGCTGGGCATCGTGGAGTACCAGCACGCCTTCAAGACCCCGGATG
CAGATGCCGGTGAAGAAAGAGTT
SEQID NO. 250
ATGCCACCTCCTCGCCTCCTCTTCTTCCTCCTCTTCCTCACCCCCATGGAAGTCAGGCCCGAGGAACCTCTAGTGGTG
AAGGTGGAAGAGGGAGATAACGCTGTGCTGCAGTGCCTCAAGGGGACCTCAGATGGCCCCACTCAGCAGCTGACCTGG
TCTCGGGAGTCCCCGCTTAAACCCTTCTTAAAACTCAGCCTGGGGCTGCCAGGCCTGGGAATCCACATGAGGCCCCTG
GCCATCTGGCTTTTCATCTTCAACGTCTCTCAACAGATGGGGGGCTTCTACCTGTGCCAGCCGGGGCCCCCCTCTGAG
AAGGCCTGGCAGCCTGGCTGGACAGTCAATGTGGAGGGCAGCGGGGAGCTGTTCCGGTGGAATGTTTCGGACCTAGGT
GGCCTGGGCTGTGGCCTGAAGAACAGGTCCTCAGAGGGCCCCAGCTCCCCTTCCGGGAAGCTCATGAGCCCCAAGCTG
TATGTGTGGGCCAAAGACCGCCCTGAGATCTGGGAGGGAGAGCCTCCGTGTCTCCCACCGAGGGACAGCCTGAACCAG
AGCCTCAGCCAGGACCTCACCATGGCCCCTGGCTCCACACTCTGGCTGTCCTGTGGGGTACCCCCTGACTCTGTGTCC
AGGGGCCCCCTCTCCTGGACCCATGTGCACCCCAAGGGGCCTAAGTCATTGCTGAGCCTAGAGCTGAAGGACGATCGC
CCGGCCAGAGATATGTGGGTAATGGAGACGGGTCTGTTGTTGCCCCGGGCCACAGCTCAAGACGCTGGAAAGTATTAT
TGTCACCGTGGCAACCTGACCATGTCATTCCACCTGGAGATCACTGCTCGGCCAGTACTATGGCACTGGCTGCTGAGG
ACTGGTGGCTGGAAGGGAGGAGGTGGGTCTGGAGGTGGAGGATCTGGTGGAGGTGGGTCTGGAGGAGGTGGGTCTCAG
GTGCAGCTGCAGGAGTCGGGCCCAGGACTGGTGAAGCCTTCGGAGACCCTGTCCCTCACCTGCACTGTCTCTGGTGGC
TCCGTCAGCAGTGGTGATTACTACTGGACCTGGATCCGGCAGTCCCCAGGGAAGGGACTGGAGTGGATTGGACACATC
TATTACAGTGGGAACACCAATTATAACCCCTCCCTCAAGAGTCGACTCACCATATCAATTGACACGTCCAAGACTCAG
TTCTCCCTGAAGCTGAGTTCTGTGACCGCTGCGGACACGGCCATTTATTACTGTGTGCGAGATCGAGTGACTGGTGCT
TTTGATATCTGGGGCCAAGGGACAATGGTCACCGTCTCTTCAGCCTCCACCAAGGGCCCATCGGTCTTCCCCCTGGCG
CCCTGCTCCAGGAGCACCTCCGAGAGCACAGCGGCCCTGGGCTGCCTGGTCAAGGACTACTTCCCTGAACCGGTGACG
GTGTCGTGGAACTCAGGCGCTCTGACCAGCGGCGTGCACACCTTCCCGGCTGTCCTACAGTCCTCAGGACTCTACTCC
CTCAGCAGCGTGGTGACCGTGCCCTCCAGCAACTTCGGCACCCAGACCTACACCTGCAACGTAGATCACAAGCCCAGC
AATACCAAGGTGGACAAGACAGTTGAGCGCAAATGTTGTGTCGAGTGCCCACCGTGCCCAGCACCACCTGTGGCAGGA
CCGTCAGTCTTCCTCTTCCCCCCAAAACCCAAGGACACCCTCATGATCTCCCGGACCCCTGAGGTCACGTGCGTGGTG
GTGGACGTGAGCCACGAAGACCCCGAGGTCCAGTTCAACTGGTACGTGGACGGCGTGGAGGTGCATAATGCCAAGACA
AAGCCACGGGAGGAGCAGTTCCAAAGCACGTTCCGTGTGGTCAGCGTCCTCACCGTCGTGCACCAGGACTGGCTGAAC
GGCAAGGAGTACAAGTGCAAGGTCTCCAACAAAGGCCTCCCAGCCCCCATCGAGAAAACCATCTCCAAAACCAAAGGG
CAGCCCCGAGAACCACAGGTGTACACCCTGCCCCCATCCCGGGAGGAGATGACCAAGAACCAGGTCAGCCTGACCTGC
CTGGTCAAAGGCTTCTACCCCAGCGACATCGCCGTGGAGTGGGAGAGCAATGGGCAGCCGGAGAACAACTACAAGACC
ACGCCTCCCATGCTGGACTCCGACGGCTCCTTCTTCCTCTACAGCAAGCTCACCGTGGACAAGAGCAGGTGGCAGCAG
GGGAACGTCTTCTCATGCTCCGTGATGCATGAGGCTCTGCACAACCACTACACGCAGAAGAGCCTCTCCCTGTCTCCG
GGT
SEQID NO. 251
ATGCCACCTCCTCGCCTCCTCTTCTTCCTCCTCTTCCTCACCCCCATGGAAGTCAGGCCCGAGGAACCTCTAGTGGTG
AAGGTGGAAGAGGGAGATAACGCTGTGCTGCAGTGCCTCAAGGGGACCTCAGATGGCCCCACTCAGCAGCTGACCTGG
TCTCGGGAGTCCCCGCTTAAACCCTTCTTAAAACTCAGCCTGGGGCTGCCAGGCCTGGGAATCCACATGAGGCCCCTG
GCCATCTGGCTTTTCATCTTCAACGTCTCTCAACAGATGGGGGGCTTCTACCTGTGCCAGCCGGGGCCCCCCTCTGAG
AAGGCCTGGCAGCCTGGCTGGACAGTCAATGTGGAGGGCAGCGGGGAGCTGTTCCGGTGGAATGTTTCGGACCTAGGT
GGCCTGGGCTGTGGCCTGAAGAACAGGTCCTCAGAGGGCCCCAGCTCCCCTTCCGGGAAGCTCATGAGCCCCAAGCTG
TATGTGTGGGCCAAAGACCGCCCTGAGATCTGGGAGGGAGAGCCTCCGTGTCTCCCACCGAGGGACAGCCTGAACCAG
AGCCTCAGCCAGGACCTCACCATGGCCCCTGGCTCCACACTCTGGCTGTCCTGTGGGGTACCCCCTGACTCTGTGTCC
AGGGGCCCCCTCTCCTGGACCCATGTGCACCCCAAGGGGCCTAAGTCATTGCTGAGCCTAGAGCTGAAGGACGATCGC
CCGGCCAGAGATATGTGGGTAATGGAGACGGGTCTGTTGTTGCCCCGGGCCACAGCTCAAGACGCTGGAAAGTATTAT
TGTCACCGTGGCAACCTGACCATGTCATTCCACCTGGAGATCACTGCTCGGCCAGTACTATGGCACTGGCTGCTGAGG
ACTGGTGGCTGGAAGGGAGGAGGTGGGTCTGGAGGAGGTGGGTCTGGAGGTGGAGGATCTGGTGGAGGTGGGTCTCAG
GTTCAGCTGGTGCAGTCTGGTGCTGAGGTGAAGAAGCCTGGTGCCTCAGTGAAGGTCTCCTGCAAGGCTTCTGGTTAC
ACATTCACTGACTACTACATGCACTGGGTGCGTCAGGCCCCTGGTCAAGGTCTTGAGTGGATGGGTCGTGTTAATCCT
AACCGGAGGGGTACTACCTACAACCAGAAATTCGAGGGCCGTGTCACCATGACCACAGACACATCCACGAGCACAGCC
TACATGGAGCTGCGTAGCCTGCGTTCTGACGACACGGCCGTGTATTACTGTGCGCGTGCGAACTGGCTTGACTACTGG
GGCCAGGGCACCACCGTCACCGTCTCCTCCGCCTCCACCAAGGGCCCATCGGTCTTCCCGCTAGCGCCCTGCTCCAGG
AGCACCTCCGAGAGCACAGCCGCCCTGGGCTGCCTGGTCAAGGACTACTTCCCCGAACCGGTGACGGTGTCGTGGAAC
TCAGGCGCCCTGACCAGCGGCGTGCACACCTTCCCGGCTGTCCTACAGTCCTCAGGACTCTACTCCCTCAGCAGCGTG
GTGACCGTGCCCTCCAGCAGCTTGGGCACGAAGACCTACACCTGCAACGTAGATCACAAGCCCAGCAACACCAAGGTG
GACAAGAGAGTTGAGTCCAAATATGGTCCCCCATGCCCACCCTGCCCAGCACCTGAGGCCGCCGGGGGACCATCAGTC
TTCCTGTTCCCCCCAAAACCCAAGGACACTCTCATGATCTCCCGGACCCCTGAGGTCACGTGCGTGGTGGTGGACGTG
AGCCAGGAAGACCCCGAGGTCCAGTTCAACTGGTACGTGGATGGCGTGGAGGTGCATAATGCCAAGACAAAGCCGCGG
GAGGAGCAGTTCAACAGCACGTACCGTGTGGTCAGCGTCCTCACCGTCCTGCACCAGGACTGGCTGAACGGCAAGGAG
TACAAGTGCAAGGTCTCCAACAAAGGCCTCCCGTCCTCCATCGAGAAAACCATCTCCAAAGCCAAAGGGCAGCCCCGA
GAGCCACAGGTGTACACCCTGCCCCCATCCCAGGAGGAGATGACCAAGAACCAGGTCAGCCTGACCTGCCTGGTCAAA
GGCTTCTACCCCAGCGACATCGCCGTGGAGTGGGAAAGCAATGGGCAGCCGGAGAACAACTACAAGACCACGCCTCCC
GTGCTGGACTCCGACGGCTCCTTCTTCCTCTACAGCAGGCTAACCGTGGACAAGAGCAGGTGGCAGGAGGGGAATGTC
TTCTCATGCTCCGTGATGCATGAGGCTCTGCACAACCACTACACACAGAAGAGCCTCTCCCTGTCTCTG
SEQEDNO. 252
ATGCCACCTCCTCGCCTCCTCTTCTTCCTCCTCTTCCTCACCCCCATGGAAGTCAGGCCCGAGGAACCTCTAGTGGTG
AAGGTGGAAGAGGGAGATAACGCTGTGCTGCAGTGCCTCAAGGGGACCTCAGATGGCCCCACTCAGCAGCTGACCTGG
TCTCGGGAGTCCCCGCTTAAACCCTTCTTAAAACTCAGCCTGGGGCTGCCAGGCCTGGGAATCCACATGAGGCCCCTG
GCCATCTGGCTTTTCATCTTCAACGTCTCTCAACAGATGGGGGGCTTCTACCTGTGCCAGCCGGGGCCCCCCTCTGAG
AAGGCCTGGCAGCCTGGCTGGACAGTCAATGTGGAGGGCAGCGGGGAGCTGTTCCGGTGGAATGTTTCGGACCTAGGT
GGCCTGGGCTGTGGCCTGAAGAACAGGTCCTCAGAGGGCCCCAGCTCCCCTTCCGGGAAGCTCATGAGCCCCAAGCTG
TATGTGTGGGCCAAAGACCGCCCTGAGATCTGGGAGGGAGAGCCTCCGTGTCTCCCACCGAGGGACAGCCTGAACCAG
AGCCTCAGCCAGGACCTCACCATGGCCCCTGGCTCCACACTCTGGCTGTCCTGTGGGGTACCCCCTGACTCTGTGTCC
AGGGGCCCCCTCTCCTGGACCCATGTGCACCCCAAGGGGCCTAAGTCATTGCTGAGCCTAGAGCTGAAGGACGATCGC
CCGGCCAGAGATATGTGGGTAATGGAGACGGGTCTGTTGTTGCCCCGGGCCACAGCTCAAGACGCTGGAAAGTATTAT
TGTCACCGTGGCAACCTGACCATGTCATTCCACCTGGAGATCACTGCTCGGCCAGTACTATGGCACTGGCTGCTGAGG
ACTGGTGGCTGGAAGGGAGGAGGTGGGTCTGGAGGTGGAGGATCTGGTGGAGGTGGGTCTGGAGGAGGTGGGTCTCAG
GTGCAGCTGGTGCAGAGCGGCGCCGAGGACAAGAAGCCCGGCGAGAGCGTGAAGATCAGCTGCAAGGCCAGCGGCTAC
ACCTTCACCAACTACGGCATGAACTGGGTGAGGCAGGCCCCCGGCCAGGGCCTGAAGTGGATGGGCTGGATCAACACC
TACACCGGCGAGAGCACCTACGCCGACGACTTCAAGGGCAGGTTCGCCTTCAGCCTGGACACCAGCGCCAGCACCGCC
TACCTGCAGCTGAGCAGCCTGAGGGGCGAGGACACCGCCGTGTACTTCTGCGCCAGGTTCGCCATCAAGGGCGACTAC
TGGGGCCAGGGCACCACCGTGACCGTGAGCAGCGCCAGCACCGGCGGCGGCGGCAGCGGCGGCGGCGGCAGCGGCGGC
GGCGGCAGCGGCGGCGGCGGCAGCGACATCGTGATGACCCAGAGCCCCCTGAGCCTGGAGGTGAGCCCCGGCGAGCCC
GCCAGCATCAGCTGCAGGAGCACCAAGAGCCTGCTGCACAGCGACGGCATCACCTACCTGTACTGGTACCTGCAGAAG
CCCGGCCAGAGCCCCCAGCTGCTGATCTACCAGCTGAGCAACCTGGCCAGCGGCGTGCCCGACAGGTTCAGCAGCAGC
GGCAGCGGCACCGACTTCACCCTGAAGATCAGCAGGGTGGAGGCCGAGGACGAGGGCACCTACTACTGCGCCCAGAAC
CTGGAGATCCCCAGGACCTTCGGCCAGGGCACCAAGCTGGAGATCAAGAGGACCCATCATCACCATCACCAT
SEQID NO. 253
ATGCCACCTCCTCGCCTCCTCTTCTTCCTCCTCTTCCTCACCCCCATGGAAGTCAGGCCCGAGGAACCTCTAGTGGTG
AAGGTGGAAGAGGGAGATAACGCTGTGCTGCAGTGCCTCAAGGGGACCTCAGATGGCCCCACTCAGCAGCTGACCTGG
TCTCGGGAGTCCCCGCTTAAACCCTTCTTAAAACTCAGCCTGGGGCTGCCAGGCCTGGGAATCCACATGAGGCCCCTG
GCCATCTGGCTTTTCATCTTCAACGTCTCTCAACAGATGGGGGGCTTCTACCTGTGCCAGCCGGGGCCCCCCTCTGAG
AAGGCCTGGCAGCCTGGCTGGACAGTCAATGTGGAGGGCAGCGGGGAGCTGTTCCGGTGGAATGTTTCGGACCTAGGT
GGCCTGGGCTGTGGCCTGAAGAACAGGTCCTCAGAGGGCCCCAGCTCCCCTTCCGGGAAGCTCATGAGCCCCAAGCTG
TATGTGTGGGCCAAAGACCGCCCTGAGATCTGGGAGGGAGAGCCTCCGTGTCTCCCACCGAGGGACAGCCTGAACCAG
AGCCTCAGCCAGGACCTCACCATGGCCCCTGGCTCCACACTCTGGCTGTCCTGTGGGGTACCCCCTGACTCTGTGTCC
AGGGGCCCCCTCTCCTGGACCCATGTGCACCCCAAGGGGCCTAAGTCATTGCTGAGCCTAGAGCTGAAGGACGATCGC
CCGGCCAGAGATATGTGGGTAATGGAGACGGGTCTGTTGTTGCCCCGGGCCACAGCTCAAGACGCTGGAAAGTATTAT
TGTCACCGTGGCAACCTGACCATGTCATTCCACCTGGAGATCACTGCTCGGCCAGTACTATGGCACTGGCTGCTGAGG
ACTGGTGGCTGGAAGGGAGGAGGTGGGTCTGGAGGTGGAGGATCTGGTGGAGGTGGGTCTGGAGGAGGTGGGTCTCAG
GTTCAGCTGGTGCAGTCTGGTGCTGAGGATGTGAAGCCTGATGCCTCAGTGAAGCTCTCCTGCAAGGCTTCTGGTTAC
ACATTCACTGACTACTACATGCACTGGGTGCGTCAGGCCCCTGGTCAAGGTCTTGAGTGGATGGGTCGTGTTAATCCT
AACCGGAGGGGTACTACCTACAACCAGAAATTCGAGGGCCGTGTCACCATGACCACAGACACATCCACGAGCACAGCC
TACATGCAGCTGAGTAGCCTGCGTGGTGAAGACACGGCCGTGTATTACTGTGCGCGTGCGAACTGGCTTGACTACTGG
GGCCAGGGCACCACCGTCACCGTCTCCTCCGCCTCCACCGGGGGAGGTGGGTCTGGAGGTGGAGGATCTGGTGGAGGT
GGGTCTGGTGGAGGTGGGTCTGACATCCAGATGACCCAGTCTCCATCCTCCCTGGAGGCATCTGTAGGAGACAGAGTC
ACCATCACTTGCAGTGTCAGCTCAAGTGTATCCTCCATTTACTTGCACTGGTATCAGCAGAAACCAGGGAAAAGCCCT
AAGCTCCTGATCTATAGCACATCCAACTTGGCTTCTGGAGTCCCAGATAGGTTCAGTGGCAGTGGATCTGGGACAGAT
TTCACTCTCACCATCAGCAGTCTGCAAGCCGAAGATGAGGGCACTTACTACTGTCAAGTCTACAGTGGTTACCCGCTC
ACGTTCGGCGGAGGGACCAAGCTGGAGATCAAACGAACTCATCATCACCATCACCAT
SEQEDNO. 254
ATGCCACCTCCTCGCCTCCTCTTCTTCCTCCTCTTCCTCACCCCCATGGAAGTCAGGCCCGAGGAACCTCTAGTGGTG
AAGGTGGAAGAGGGAGATAACGCTGTGCTGCAGTGCCTCAAGGGGACCTCAGATGGCCCCACTCAGCAGCTGACCTGG
TCTCGGGAGTCCCCGCTTAAACCCTTCTTAAAACTCAGCCTGGGGCTGCCAGGCCTGGGAATCCACATGAGGCCCCTG
GCCATCTGGCTTTTCATCTTCAACGTCTCTCAACAGATGGGGGGCTTCTACCTGTGCCAGCCGGGGCCCCCCTCTGAG
AAGGCCTGGCAGCCTGGCTGGACAGTCAATGTGGAGGGCAGCGGGGAGCTGTTCCGGTGGAATGTTTCGGACCTAGGT
GGCCTGGGCTGTGGCCTGAAGAACAGGTCCTCAGAGGGCCCCAGCTCCCCTTCCGGGAAGCTCATGAGCCCCAAGCTG
TATGTGTGGGCCAAAGACCGCCCTGAGATCTGGGAGGGAGAGCCTCCGTGTCTCCCACCGAGGGACAGCCTGAACCAG
AGCCTCAGCCAGGACCTCACCATGGCCCCTGGCTCCACACTCTGGCTGTCCTGTGGGGTACCCCCTGACTCTGTGTCC
AGGGGCCCCCTCTCCTGGACCCATGTGCACCCCAAGGGGCCTAAGTCATTGCTGAGCCTAGAGCTGAAGGACGATCGC
CCGGCCAGAGATATGTGGGTAATGGAGACGGGTCTGTTGTTGCCCCGGGCCACAGCTCAAGACGCTGGAAAGTATTAT
TGTCACCGTGGCAACCTGACCATGTCATTCCACCTGGAGATCACTGCTCGGCCAGTACTATGGCACTGGCTGCTGAGG
ACTGGTGGCTGGAAGGGAGGAGGTGGGTCTGGAGGTGGAGGATCTGGTGGAGGTGGGTCTGGAGGAGGTGGGTCTCAG
GTGCAGCTGCAGGAGAGCGGCCCCGGCGACGTGAAGCCCAGCGAGACCCTGAGCCTGACCTGCACCGTGAGCGGCGGC
AGCGTGAGCAGCGGCGACTACTACTGGACCTGGATCAGGCAGAGCCCCGGCAAGGGCCTGGAGTGGATCGGCCACATC
TACTACAGCGGCAACACCAACTACAACCCCAGCCTGAAGAGCAGGCTGACCATCAGCATCGACACCAGCAAGACCACC
TTCAGCCTGCAGCTGAGCAGCGTGACCGGCGAGGACACCGCCATCTACTACTGCGTGAGGGACAGGGTGACCGGCGCC
TTCGACATCTGGGGCCAGGGCACCACCGTGACCGTGAGCAGCGCCAGCACCGGCGGCGGCGGCAGCGGCGGCGGCGGC
AGCGGCGGCGGCGGCAGCGGCGGCGGCGGCAGCGACATCCAGATGACCCAGAGCCCCAGCAGCCTGGAGGCCAGCGTG
GGCGACAGGGTGACCATCACCTGCCAGGCCAGCCAGGACATCAGCAACTACCTGAACTGGTACCAGCAGAAGCCCGGC
AAGAGCCCCAAGCTGCTGATCTACGACGCCAGCAACCTGGAGACCGGCGTGCCCGACAGGTTCAGCGGCAGCGGCAGC
GGCACCGACTTCACCTTCACCATCAGCAGCCTGCAGGCCGAGGACGAGGGCACCTACTTCTGCCAGCACTTCGACCAC
CTGCCCCTGGCCTTCGGCGGCGGCACCAAGCTGGAGATCAAGAGGACCCATCATCACCATCACCAT
SEQID NO. 255
ATGCCACCTCCTCGCCTCCTCTTCTTCCTCCTCTTCCTCACCCCCATGGAAGTCAGGCCCGAGGAACCTCTAGTGGTG
AAGGTGGAAGAGGGAGATAACGCTGTGCTGCAGTGCCTCAAGGGGACCTCAGATGGCCCCACTCAGCAGCTGACCTGG
TCTCGGGAGTCCCCGCTTAAACCCTTCTTAAAACTCAGCCTGGGGCTGCCAGGCCTGGGAATCCACATGAGGCCCCTG
GCCATCTGGCTTTTCATCTTCAACGTCTCTCAACAGATGGGGGGCTTCTACCTGTGCCAGCCGGGGCCCCCCTCTGAG
AAGGCCTGGCAGCCTGGCTGGACAGTCAATGTGGAGGGCAGCGGGGAGCTGTTCCGGTGGAATGTTTCGGACCTAGGT
GGCCTGGGCTGTGGCCTGAAGAACAGGTCCTCAGAGGGCCCCAGCTCCCCTTCCGGGAAGCTCATGAGCCCCAAGCTG
TATGTGTGGGCCAAAGACCGCCCTGAGATCTGGGAGGGAGAGCCTCCGTGTCTCCCACCGAGGGACAGCCTGAACCAG
AGCCTCAGCCAGGACCTCACCATGGCCCCTGGCTCCACACTCTGGCTGTCCTGTGGGGTACCCCCTGACTCTGTGTCC
AGGGGCCCCCTCTCCTGGACCCATGTGCACCCCAAGGGGCCTAAGTCATTGCTGAGCCTAGAGCTGAAGGACGATCGC
CCGGCCAGAGATATGTGGGTAATGGAGACGGGTCTGTTGTTGCCCCGGGCCACAGCTCAAGACGCTGGAAAGTATTAT
TGTCACCGTGGCAACCTGACCATGTCATTCCACCTGGAGATCACTGCTCGGCCAGTACTATGGCACTGGCTGCTGAGG
ACTGGTGGCTGGAAGGGGGGAGGTGGGTCTGGAGGTGGAGGATCTGGTGGAGGTGGGTCTGGTGGAGGTGGGTCTGAG
GTGCAGCTGGTGGAGTCTGGTGGTGGTCTTGTTCAACCTGGTGGTTCTCTTCGTCTTTCTTGTGCTGCTTCTGGTTTT
AATATTAAAGATACTTATATTCATTGGGTTCGTCAAGCTCCTGGTAAAGGTCTTGAATGGGTTGCTCGTATTTATCCT
ACTAATGGTTATACTCGTTATGCTGATTCTGTTAAAGGTCGTTTTACTATTTCTGCTGATACTTCTAAAAATACTGCT
TATCTTCAAATGAACTCTCTTCGTGCTGAAGATACTGCTGTTTATTATTGTTCTCGTTGGGGTGGTGATGGTTTTTAT
GCTATGGATTATTGGGGTCAAGGTACTCTTGTCACCGTCTCCTCAGCTAGCACCGGGGGAGGTGGGTCTGGAGGTGGA
GGATCTGGTGGAGGTGGGTCTGACATCCAGATGACCCAGTCTCCTTCTTCTCTTTCTGCTTCTGTTGGTGATCGTGTT
ACTATTACTTGTCGTGCTTCTCAAGATGTTAATACTGCTGTTGCTTGGTATCAACAAAAACCTGGTAAAGCTCCTAAA
CTTCTTATTTATTCTGCTTCTTTTCTTTATTCTGGTGTTCCTTCTCGTTTTTCTGGTTCTCGTTCTGGTACTGATTTT
ACTCTTACTATTTCTTCTCTTCAACCTGAAGATTTTGCTACTTATTATTGTCAACAACATTATACTACTCCTCCTACT
TTTGGTCAAGGTACCAAGGTGGAGATCAAACGTACGCATCATCACCATCACCAT
SEQID NO. 256
ATGCCACCTCCTCGCCTCCTCTTCTTCCTCCTCTTCCTCACCCCCATGGAAGTCAGGCCCGAGGAACCTCTAGTGGTG
AAGGTGGAAGAGGGAGATAACGCTGTGCTGCAGTGCCTCAAGGGGACCTCAGATGGCCCCACTCAGCAGCTGACCTGG
TCTCGGGAGTCCCCGCTTAAACCCTTCTTAAAACTCAGCCTGGGGCTGCCAGGCCTGGGAATCCACATGAGGCCCCTG
GCCATCTGGCTTTTCATCTTCAACGTCTCTCAACAGATGGGGGGCTTCTACCTGTGCCAGCCGGGGCCCCCCTCTGAG
AAGGCCTGGCAGCCTGGCTGGACAGTCAATGTGGAGGGCAGCGGGGAGCTGTTCCGGTGGAATGTTTCGGACCTAGGT
GGCCTGGGCTGTGGCCTGAAGAACAGGTCCTCAGAGGGCCCCAGCTCCCCTTCCGGGAAGCTCATGAGCCCCAAGCTG
TATGTGTGGGCCAAAGACCGCCCTGAGATCTGGGAGGGAGAGCCTCCGTGTCTCCCACCGAGGGACAGCCTGAACCAG
AGCCTCAGCCAGGACCTCACCATGGCCCCTGGCTCCACACTCTGGCTGTCCTGTGGGGTACCCCCTGACTCTGTGTCC
AGGGGCCCCCTCTCCTGGACCCATGTGCACCCCAAGGGGCCTAAGTCATTGCTGAGCCTAGAGCTGAAGGACGATCGC
CCGGCCAGAGATATGTGGGTAATGGAGACGGGTCTGTTGTTGCCCCGGGCCACAGCTCAAGACGCTGGAAAGTATTAT
TGTCACCGTGGCAACCTGACCATGTCATTCCACCTGGAGATCACTGCTCGGCCAGTACTATGGCACTGGCTGCTGAGG
ACTGGTGGCTGGAAGGACAAAACTCACACATGCCCACCGTGCCCAGCACCTGAACTCCTGGGGGGACCGTCAGTCTTC
CTCTTCCCCCCAAAACCCAAGGACACCCTCATGATCTCCCGGACCCCTGAGGTCACATGCGTGGTGGTGGACGTGAGC
CACGAAGACCCTGAGGTCAAGTTCAACTGGTACGTGGACGGCGTGGAGGTGCATAATGCCAAGACAAAGCCGCGGGAG
GAGCAGTACAACAGCACGTACCGTGTGGTCAGCGTCCTCACCGTCCTGCACCAGGACTGGCTGAATGGCAAGGAGTAC
AAGTGCAAGGTCTCCAACAAAGCCCTCCCAGCCCCCATCGAGAAAACCATCTCCAAAGCCAAAGGGCAGCCCCGAGAA
CCACAGGTGTACACCCTGCCCCCATCCCGGGAGGAGATGACCAAGAACCAGGTCAGCCTGACCTGCCTGGTCAAAGGC
TTCTATCCCAGCGACATCGCCGTGGAGTGGGAGAGCAATGGGCAGCCGGAGAACAACTACAAGACCACGCCTCCCGTG
CTGGACTCCGACGGCTCCTTCTTCCTCTACAGCAAGCTCACCGTGGACAAGAGCAGGTGGCAGCAGGGGAACGTCTTC
TCATGCTCCGTGATGCACGAGGCTCTGCACAACCACTACACGCAGAAGAGCCTCTCCCTGTCTCCGGGTGGAGGAGGT
GGGTCTGGAGGTGGAGGATCTGGTGGAGGTGGGTCTGGAGGAGGTGGGTCTGAGGTGCAGCTGGTGGAGTCTGGTGGT
GGTCTTGTTCAACCTGGTGGTTCTCTTCGTCTTTCTTGTGCTGCTTCTGGTTTTAATATTAAAGATACTTATATTCAT
TGGGTTCGTCAAGCTCCTGGTAAAGGTCTTGAATGGGTTGCTCGTATTTATCCTACTAATGGTTATACTCGTTATGCT
GATTCTGTTAAAGGTCGTTTTACTATTTCTGCTGATACTTCTAAAAATACTGCTTATCTTCAAATGAACTCTCTTCGT
GCTGAAGATACTGCTGTTTATTATTGTTCTCGTTGGGGTGGTGATGGTTTTTATGCTATGGATTATTGGGGTCAAGGT
ACTCTTGTCACCGTCTCCTCAGCTAGCACCGGGGGAGGTGGGTCTGGAGGTGGAGGATCTGGTGGAGGTGGGTCTGAC
ATCCAGATGACCCAGTCTCCTTCTTCTCTTTCTGCTTCTGTTGGTGATCGTGTTACTATTACTTGTCGTGCTTCTCAA
GATGTTAATACTGCTGTTGCTTGGTATCAACAAAAACCTGGTAAAGCTCCTAAACTTCTTATTTATTCTGCTTCTTTT
CTTTATTCTGGTGTTCCTTCTCGTTTTTCTGGTTCTCGTTCTGGTACTGATTTTACTCTTACTATTTCTTCTCTTCAA
CCTGAAGATTTTGCTACTTATTATTGTCAACAACATTATACTACTCCTCCTACTTTTGGTCAAGGTACCAAGGTGGAG
ATCAAACGTACG
SEQID NO. 257
ATGGAGCTGGCGGCCTTGTGCCGCTGGGGGCTCCTCCTCGCCCTCTTGCCCCCCGGAGCCGCGAGCACCCAAGTGTGC
ACCGGCACAGACATGAAGCTGCGGCTCCCTGCCAGTCCCGAGACCCACCTGGACATGCTCCGCCACCTCTACCAGGGC
TGCCAGGTGGTGCAGGGAAACCTGGAACTCACCTACCTGCCCACCAATGCCAGCCTGTCCTTCCTGCAGGATATCCAG
GAGGTGCAGGGCTACGTGCTCATCGCTCACAACCAAGTGAGGCAGGTCCCACTGCAGAGGCTGCGGATTGTGCGAGGC
ACCCAGCTCTTTGAGGACAACTATGCCCTGGCCGTGCTAGACAATGGAGACCCGCTGAACAATACCACCCCTGTCACA
GGGGCCTCCCCAGGAGGCCTGCGGGAGCTGCAGCTTCGAAGCCTCACAGAGATCTTGAAAGGAGGGGTCTTGATCCAG
CGGAACCCCCAGCTCTGCTACCAGGACACGATTTTGTGGAAGGACATCTTCCACAAGAACAACCAGCTGGCTCTCACA
CTGATAGACACCAACCGCTCTCGGGCCTGCCACCCCTGTTCTCCGATGTGTAAGGGCTCCCGCTGCTGGGGAGAGAGT
TCTGAGGATTGTCAGAGCCTGACGCGCACTGTCTGTGCCGGTGGCTGTGCCCGCTGCAAGGGGCCACTGCCCACTGAC
TGCTGCCATGAGCAGTGTGCTGCCGGCTGCACGGGCCCCAAGCACTCTGACTGCCTGGCCTGCCTCCACTTCAACCAC
AGTGGCATCTGTGAGCTGCACTGCCCAGCCCTGGTCACCTACAACACAGACACGTTTGAGTCCATGCCCAATCCCGAG
GGCCGGTATACATTCGGCGCCAGCTGTGTGACTGCCTGTCCCTACAACTACCTTTCTACGGACGTGGGATCCTGCACC
CTCGTCTGCCCCCTGCACAACCAAGAGGTGACAGCAGAGGATGGAACACAGCGGTGTGAGAAGTGCAGCAAGCCCTGT
GCCCGAGTGTGCTATGGTCTGGGCATGGAGCACTTGCGAGAGGTGAGGGCAGTTACCAGTGCCAATATCCAGGAGTTT
GCTGGCTGCAAGAAGATCTTTGGGAGCCTGGCATTTCTGCCGGAGAGCTTTGATGGGGACCCAGCCTCCAACACTGCC
CCGCTCCAGCCAGAGCAGCTCCAAGTGTTTGAGACTCTGGAAGAGATCACAGGTTACCTATACATCTCAGCATGGCCG
GACAGCCTGCCTGACCTCAGCGTCTTCCAGAACCTGCAAGTAATCCGGGGACGAATTCTGCACAATGGCGCCTACTCG
CTGACCCTGCAAGGGCTGGGCATCAGCTGGCTGGGGCTGCGCTCACTGAGGGAACTGGGCAGTGGACTGGCCCTCATC
CACCATAACACCCACCTCTGCTTCGTGCACACGGTGCCCTGGGACCAGCTCTTTCGGAACCCGCACCAAGCTCTGCTC
CACACTGCCAACCGGCCAGAGGACGAGTGTGTGGGCGAGGGCCTGGCCTGCCACCAGCTGTGCGCCCGAGGGCACTGC
TGGGGTCCAGGGCCCACCCAGTGTGTCAACTGCAGCCAGTTCCTTCGGGGCCAGGAGTGCGTGGAGGAATGCCGAGTA
CTGCAGGGGCTCCCCAGGGAGTATGTGAATGCCAGGCACTGTTTGCCGTGCCACCCTGAGTGTCAGCCCCAGAATGGC
TCAGTGACCTGTTTTGGACCGGAGGCTGACCAGTGTGTGGCCTGTGCCCACTATAAGGACCCTCCCTTCTGCGTGGCC
CGCTGCCCCAGCGGTGTGAAACCTGACCTCTCCTACATGCCCATCTGGAAGTTTCCAGATGAGGAGGGCGCATGCCAG
CCTTGCCCCATCAACTGCACCCACTCCTGTGTGGACCTGGATGACAAGGGCTGCCCCGCCGAGCAGAGAGCCAGCCCT
CTGACGGGAGGAGGTGGGTCTGGAGGTGGAGGATCTGGTGGAGGTGGGTCTGGAGGAGGTGGGTCTCAGGTGCAGCTG
CAGGAGAGCGGCCCCGGCGACGTGAAGCCCAGCGAGACCCTGAGCCTGACCTGCACCGTGAGCGGCGGCAGCGTGAGC
AGCGGCGACTACTACTGGACCTGGATCAGGCAGAGCCCCGGCAAGGGCCTGGAGTGGATCGGCCACATCTACTACAGC
GGCAACACCAACTACAACCCCAGCCTGAAGAGCAGGCTGACCATCAGCATCGACACCAGCAAGACCACCTTCAGCCTG
CAGCTGAGCAGCGTGACCGGCGAGGACACCGCCATCTACTACTGCGTGAGGGACAGGGTGACCGGCGCCTTCGACATC
TGGGGCCAGGGCACCACCGTGACCGTGAGCAGCGCCAGCACCGGCGGCGGCGGCAGCGGCGGCGGCGGCAGCGGCGGC
GGCGGCAGCGGCGGCGGCGGCAGCGACATCCAGATGACCCAGAGCCCCAGCAGCCTGGAGGCCAGCGTGGGCGACAGG
GTGACCATCACCTGCCAGGCCAGCCAGGACATCAGCAACTACCTGAACTGGTACCAGCAGAAGCCCGGCAAGAGCCCC
AAGCTGCTGATCTACGACGCCAGCAACCTGGAGACCGGCGTGCCCGACAGGTTCAGCGGCAGCGGCAGCGGCACCGAC
TTCACCTTCACCATCAGCAGCCTGCAGGCCGAGGACGAGGGCACCTACTTCTGCCAGCACTTCGACCACCTGCCCCTG
GCCTTCGGCGGCGGCACCAAGCTGGAGATCAAGAGGACCCATCATCACCATCACCAT
SEQID NO. 258
ATGGAGCTGGCGGCCTTGTGCCGCTGGGGGCTCCTCCTCGCCCTCTTGCCCCCCGGAGCCGCGAGCAACCGGCCAGAG
GACGAGTGTGTGGGCGAGGGCCTGGCCTGCCACCAGCTGTGCGCCCGAGGGCACTGCTGGGGTCCAGGGCCCACCCAG
TGTGTCAACTGCAGCCAGTTCCTTCGGGGCCAGGAGTGCGTGGAGGAATGCCGAGTACTGCAGGGGCTCCCCAGGGAG
TATGTGAATGCCAGGCACTGTTTGCCGTGCCACCCTGAGTGTCAGCCCCAGAATGGCTCAGTGACCTGTTTTGGACCG
GAGGCTGACCAGTGTGTGGCCTGTGCCCACTATAAGGACCCTCCCTTCTGCGTGGCCCGCTGCCCCAGCGGTGTGAAA
CCTGACCTCTCCTACATGCCCATCTGGAAGTTTCCAGATGAGGAGGGCGCATGCCAGCCTTGCCCCATCAACTGCACC
CACTCCTGTGTGGACCTGGATGACAAGGGCTGCCCCGCCGAGCAGAGAGCCAGCCCTCTGACGGGAGGAGGTGGGTCT
GGAGGTGGAGGATCTGGTGGAGGTGGGTCTGGAGGAGGTGGGTCTCAGGTGCAGCTGCAGGAGAGCGGCCCCGGCGAC
GTGAAGCCCAGCGAGACCCTGAGCCTGACCTGCACCGTGAGCGGCGGCAGCGTGAGCAGCGGCGACTACTACTGGACC
TGGATCAGGCAGAGCCCCGGCAAGGGCCTGGAGTGGATCGGCCACATCTACTACAGCGGCAACACCAACTACAACCCC
AGCCTGAAGAGCAGGCTGACCATCAGCATCGACACCAGCAAGACCACCTTCAGCCTGCAGCTGAGCAGCGTGACCGGC
GAGGACACCGCCATCTACTACTGCGTGAGGGACAGGGTGACCGGCGCCTTCGACATCTGGGGCCAGGGCACCACCGTG
ACCGTGAGCAGCGCCAGCACCGGCGGCGGCGGCAGCGGCGGCGGCGGCAGCGGCGGCGGCGGCAGCGGCGGCGGCGGC
AGCGACATCCAGATGACCCAGAGCCCCAGCAGCCTGGAGGCCAGCGTGGGCGACAGGGTGACCATCACCTGCCAGGCC
AGCCAGGACATCAGCAACTACCTGAACTGGTACCAGCAGAAGCCCGGCAAGAGCCCCAAGCTGCTGATCTACGACGCC
AGCAACCTGGAGACCGGCGTGCCCGACAGGTTCAGCGGCAGCGGCAGCGGCACCGACTTCACCTTCACCATCAGCAGC
CTGCAGGCCGAGGACGAGGGCACCTACTTCTGCCAGCACTTCGACCACCTGCCCCTGGCCTTCGGCGGCGGCACCAAG
CTGGAGATCAAGAGGACCCATCATCACCATCACCAT
SEQID NO. 263
ATGCCACCTCCTCGCCTCCTCTTCTTCCTCCTCTTCCTCACCCCCATGGAAGTCAGGCCCGAGGAACCTCTAGTGGTG
AAGGTGGAAGAGGGAGATAACGCTGTGCTGCAGTGCCTCAAGGGGACCTCAGATGGCCCCACTCAGCAGCTGACCTGG
TCTCGGGAGTCCCCGCTTAAACCCTTCTTAAAACTCAGCCTGGGGCTGCCAGGCCTGGGAATCCACATGAGGCCCCTG
GCCATCTGGCTTTTCATCTTCAACGTCTCTCAACAGATGGGGGGCTTCTACCTGTGCCAGCCGGGGCCCCCCTCTGAG
AAGGCCTGGCAGCCTGGCTGGACAGTCAATGTGGAGGGCAGCGGGGAGCTGTTCCGGTGGAATGTTTCGGACCTAGGT
GGCCTGGGCTGTGGCCTGAAGAACAGGTCCTCAGAGGGCCCCAGCTCCCCTTCCGGGAAGCTCATGAGCCCCAAGCTG
TATGTGTGGGCCAAAGACCGCCCTGAGATCTGGGAGGGAGAGCCTCCGTGTCTCCCACCGAGGGACAGCCTGAACCAG
AGCCTCAGCCAGGACCTCACCATGGCCCCTGGCTCCACACTCTGGCTGTCCTGTGGGGTACCCCCTGACTCTGTGTCC
AGGGGCCCCCTCTCCTGGACCCATGTGCACCCCAAGGGGCCTAAGTCATTGCTGAGCCTAGAGCTGAAGGACGATCGC
CCGGCCAGAGATATGTGGGTAATGGAGACGGGTCTGTTGTTGCCCCGGGCCACAGCTCAAGACGCTGGAAAGTATTAT
TGTCACCGTGGCAACCTGACCATGTCATTCCACCTGGAGATCACTGCTCGGCCAGTACTATGGCACTGGCTGCTGAGG
ACTGGTGGCTGGAAGGGAGGAGGTGGGTCTGGAGGTGGAGGATCTGGTGGAGGTGGGTCTGGAGGAGGTGGGTCTGAG
GTGCAGCTGCAGCAGTCTGGGGCTGAGCTGGTGAAGCCTGGGGCCTCAGTGAAGATGTCCTGCAAGGCTTCTGGCTAC
ACATTTACCAGTTACAATATGCACTGGGTAAAGCAGACACCTGGACAGGGCCTGGAATGGATTGGAGCTATTTATCCA
GGAAATGGTGATACTTCCTACAATCAGAAGTTCAAAGGCAAGGCCACATTGACTGCAGACAAATCCTCCAGCACAGCC
TACATGCAGCTCAGCAGCCTGACATCTGAGGACTCTGCGGACTATTACTGTGCAAGATCTAATTATTACGGTAGTAGC
TACTGGTTCTTCGATGTCTGGGGCGCAGGGACCACGGTCACCGTCTCCTCAGGCAGTACTAGCGGTGGTGGCTCCGGG
GGCGGTTCCGGTGGGGGCGGCAGCAGCGACATTGTGCTGACCCAATCTCCAGCTATCCTGTCTGCATCTCCAGGGGAG
AAGGTCACAATGACTTGCAGGGCCAGCTCAAGTGTAAATTACATGGACTGGTACCAGAAGAAGCCAGGATCCTCCCCC
AAACCCTGGATTTATGCCACATCCAACCTGGCTTCTGGAGTCCCTGCTCGCTTCAGTGGCAGTGGGTCTGGGACCTCT
TACTCTCTCACAATCAGCAGAGTGGAGGCTGAAGATGCTGCCACTTATTACTGCCAGCAGTGGAGTTTTAATCCACCC
ACGTTCGGAGGGGGGACCAAGCTGGAAATAAAACATCATCACCATCACCAT
SEQID NO. 264
ATGCATCTCCTCGGCCCCTGGCTCCTGCTCCTGGTTCTAGAATACTTGGCTTTCTCTGACTCAAGTAAATGGGTTTTT
GAGCACCCTGAAACCCTCTACGCCTGGGAGGGGGCCTGCGTCTGGATCCCCTGCACCTACAGAGCCCTAGATGGTGAC
CTGGAAAGCTTCATCCTGTTCCACAATCCTGAGTATAACAAGAACACCTCGAAGTTTGATGGGACAAGACTCTATGAA
AGCACAAAGGATGGGAAGGTTCCTTCTGAGCAGAAAAGGGTGCAATTCCTGGGAGACAAGAATAAGGCCTGCACACTG
AGTATCCACCCGGTGCACCTCAATGACAGTGGTCAGCTGGGGCTGAGGATGGAGTCCAAGACTGAGAAATGGATGGAA
CGAATACACCTCAATGTCTCTGAAAGGCCTTTTCCACCTCATATCCAGCTCCCTCCAGAAATTCAAGAGTCCCAGGAA
GTCACTCTGACCTGCTTGCTGAATTTCTCCTGCTATGGGTATCCGATCCAATTGCAGTGGCTCCTAGAGGGGGTTCCA
ATGAGGCAGGCTGCTGTCACCTCGACCTCCTTGACCATCAAGTCTGTCTTCACCCGGAGCGAGCTCAAGTTCTCCCCA
CAGTGGAGTCACCATGGGAAGATTGTGACCTGCCAGCTTCAGGATGCAGATGGGAAGTTCCTCTCCAATGACACGGTG
CAGCTGAACGTGAAGCACACCCCGAAGTTGGAGATCAAGGTCACTCCCAGTGATGCCATAGTGAGGGAGGGGGACTCT
GTGACCATGACCTGCGAGGTCAGCAGCAGCAACCCGGAGTACACGACGGTATCCTGGCTCAAGGATGGGACCTCGCTG
AAGAAGCAGAATACATTCACGCTAAACCTGCGCGAAGTGACCAAGGACCAGAGTGGGAAGTACTGCTGTCAGGTCTCC
AATGACGTGGGCCCGGGAAGGTCGGAAGAAGTGTTCCTGCAAGTGCAGTATGCCCCGGAAGGAGGAGGTGGGTCTGGA
GGTGGAGGATCTGGTGGAGGTGGGTCTGGAGGAGGTGGGTCTGACATCCAGATGACACAGACTACATCCTCCCTGTCT
GCCTCTCTGGGAGACAGAGTCACCATCAGTTGCAGGGCAAGTCAGGACATTAGTAAATATTTAAATTGGTATCAGCAG
AAACCAGATGGAACTGTTAAACTCCTGATCTACCATACATCAAGATTACACTCAGGAGTCCCATCAAGGTTCAGTGGC
AGTGGGTCTGGAACAGATTATTCTCTCACCATTAGCAACCTGGAGCAAGAAGATATTGCCACTTACTTTTGCCAACAG
GGTAATACGCTTCCGTACACGTTCGGAGGGGGGACTAAGTTGGAAATAACAGGAGGAGGTGGGTCTGGAGGTGGAGGA
TCTGGTGGAGGTGGGTCTGGAGGAGGTGGGTCTGAGGTGAAACTGCAGGAGTCAGGACCTGGCCTGGTGGCGCCCTCA
CAGAGCCTGTCCGTCACATGCACTGTCTCAGGGGTCTCATTACCCGACTATGGTGTAAGCTGGATTCGCCAGCCTCCA
CGAAAGGGTCTGGAGTGGCTGGGAGTAATATGGGGTAGTGAAACCACATACTATAATTCAGCTCTCAAATCCAGACTG
ACCATCATCAAGGACAACTCCAAGAGCCAAGTTTTCTTAAAAATGAACAGTCTGCAAACTGATGACACAGCCATTTAC
TACTGTGCCAAACATTATTACTACGGTGGTAGCTATGCTATGGACTACTGGGGTCAAGGAACCTCAGTCACCGTCTCC
TCACATCATCACCATCACCAT
SEQID NO. 265
ATGCATCTCCTCGGCCCCTGGCTCCTGCTCCTGGTTCTAGAATACTTGGCTTTCTCTGACTCAAGTAAATGGGTTTTT
GAGCACCCTGAAACCCTCTACGCCTGGGAGGGGGCCTGCGTCTGGATCCCCTGCACCTACAGAGCCCTAGATGGTGAC
CTGGAAAGCTTCATCCTGTTCCACAATCCTGAGTATAACAAGAACACCTCGAAGTTTGATGGGACAAGACTCTATGAA
AGCACAAAGGATGGGAAGGTTCCTTCTGAGCAGAAAAGGGTGCAATTCCTGGGAGACAAGAATAAGGCCTGCACACTG
AGTATCCACCCGGTGCACCTCAATGACAGTGGTCAGCTGGGGCTGAGGATGGAGTCCAAGACTGAGAAATGGATGGAA
CGAATACACCTCAATGTCTCTGAAAGGCCTTTTCCACCTCATATCCAGCTCCCTCCAGAAATTCAAGAGTCCCAGGAA
GTCACTCTGACCTGCTTGCTGAATTTCTCCTGCTATGGGTATCCGATCCAATTGCAGTGGCTCCTAGAGGGGGTTCCA
ATGAGGCAGGCTGCTGTCACCTCGACCTCCTTGACCATCAAGTCTGTCTTCACCCGGAGCGAGCTCAAGTTCTCCCCA
CAGTGGAGTCACCATGGGAAGATTGTGACCTGCCAGCTTCAGGATGCAGATGGGAAGTTCCTCTCCAATGACACGGTG
CAGCTGAACGTGAAGCACACCCCGAAGTTGGAGATCAAGGTCACTCCCAGTGATGCCATAGTGAGGGAGGGGGACTCT
GTGACCATGACCTGCGAGGTCAGCAGCAGCAACCCGGAGTACACGACGGTATCCTGGCTCAAGGATGGGACCTCGCTG
AAGAAGCAGAATACATTCACGCTAAACCTGCGCGAAGTGACCAAGGACCAGAGTGGGAAGTACTGCTGTCAGGTCTCC
AATGACGTGGGCCCGGGAAGGTCGGAAGAAGTGTTCCTGCAAGTGCAGTATGCCCCGGAAGGAGGAGGTGGGTCTGGA
GGTGGAGGATCTGGTGGAGGTGGGTCTGGAGGAGGTGGGTCTGAGGTGCAGCTGCAGCAGTCTGGGGCTGAGCTGGTG
AAGCCTGGGGCCTCAGTGAAGATGTCCTGCAAGGCTTCTGGCTACACATTTACCAGTTACAATATGCACTGGGTAAAG
CAGACACCTGGACAGGGCCTGGAATGGATTGGAGCTATTTATCCAGGAAATGGTGATACTTCCTACAATCAGAAGTTC
AAAGGCAAGGCCACATTGACTGCAGACAAATCCTCCAGCACAGCCTACATGCAGCTCAGCAGCCTGACATCTGAGGAC
TCTGCGGACTATTACTGTGCAAGATCTAATTATTACGGTAGTAGCTACTGGTTCTTCGATGTCTGGGGCGCAGGGACC
ACGGTCACCGTCTCCTCAGGCAGTACTAGCGGTGGTGGCTCCGGGGGCGGTTCCGGTGGGGGCGGCAGCAGCGACATT
GTGCTGACCCAATCTCCAGCTATCCTGTCTGCATCTCCAGGGGAGAAGGTCACAATGACTTGCAGGGCCAGCTCAAGT
GTAAATTACATGGACTGGTACCAGAAGAAGCCAGGATCCTCCCCCAAACCCTGGATTTATGCCACATCCAACCTGGCT
TCTGGAGTCCCTGCTCGCTTCAGTGGCAGTGGGTCTGGGACCTCTTACTCTCTCACAATCAGCAGAGTGGAGGCTGAA
GATGCTGCCACTTATTACTGCCAGCAGTGGAGTTTTAATCCACCCACGTTCGGAGGGGGGACCAAGCTGGAAATAAAA
CATCATCACCATCACCAT
SEQID NO. 266
AAGCTTGTTGACATTGATTATTGACTAGTTATTAATAGTAATCAATTACGGGGTCATTAGTTCATAGCCCATATATGG
AGTTCCGCGTTACATAACTTACGGTAAATGGCCCGCCTGGCTGACCGCCCAACGACCCCCGCCCATTGACGTCAATAA
TGACGTATGTTCCCATAGTAACGCCAATAGGGACTTTCCATTGACGTCAATGGGTGGAGTATTTACGGTAAACTGCCC
ACTTGGCAGTACATCAAGTGTATCATATGCCAAGTACGCCCCCTATTGACGTCAATGACGGTAAATGGCCCGCCTGGC
ATTATGCCCAGTACATGACCTTATGGGACTTTCCTACTTGGCAGTACATCTACGTATTAGTCATCGCTATTACCATGG
TGATGCGGTTTTGGCAGTACATCAATGGGCGTGGATAGCGGTTTGACTCACGGGGATTTCCAAGTCTCCACCCCATTG
ACGTCAATGGGAGTTTGTTTTGGCACCAAAATCAACGGGACTTTCCAAAATGTCGTAACAACTCCGCCCCATTGACGC
AAATGGGCGGTAGGCGTGTACGGTGGGAGGTCTATATAAGCAGAGCTCAAGCTTAACTAGTTAGCGGACCGACGCGTA
CGCGGCCGCTCGAGATGGAGAGCGACGAGAGCGGCCTGCCCGCCATGGAGATCGAGTGCCGCATCACCGGCACCCTGA
ACGGCGTGGAGTTCGAGCTGGTGGGCGGCGGAGAGGGCACCCCCGAGCAGGGCCGCATGACCAACAAGATGAAGAGCA
CCAAAGGCGCCCTGACCTTCAGCCCCTACCTGCTGAGCCACGTGATGGGCTACGGCTTCTACCACTTCGGCACCTACC
CCAGCGGCTACGAGAACCCCTTCCTGCACGCCATCAACAACGGCGGCTACACCAACACCCGCATCGAGAAGTACGAGG
ACGGCGGCGTGCTGCACGTGAGCTTCAGCTACCGCTACGAGGCCGGCCGCGTGATCGGCGACTTCAAGGTGATGGGCA
CCGGCTTCCCCGAGGACAGCGTGATCTTCACCGACAAGATCATCCGCAGCAACGCCACCGTGGAGCACCTGCACCCCA
TGGGCGATAACGATCTGGATGGCAGCTTCACCCGCACCTTCAGCCTGCGCGACGGCGGCTACTACAGCTCCGTGGTGG
ACAGCCACATGCACTTCAAGAGCGCCATCCACCCCAGCATCCTGCAGAACGGGGGCCCCATGTTCGCCTTCCGCCGCG
TGGAGGAGGATCACAGCAACACCGAGCTGGGCATCGTGGAGTACCAGCACGCCTTCAAGACCCCGGATGCAGATGCCG
GTGAAGAAAGAGTT
SEQID NO. 267
ATGCCACCTCCTCGCCTCCTCTTCTTCCTCCTCTTCCTCACCCCCATGGAAGTCAGGCCCGAGGAACCTCTAGTGGTG
AAGGTGGAAGAGGGAGATAACGCTGTGCTGCAGTGCCTCAAGGGGACCTCAGATGGCCCCACTCAGCAGCTGACCTGG
TCTCGGGAGTCCCCGCTTAAACCCTTCTTAAAACTCAGCCTGGGGCTGCCAGGCCTGGGAATCCACATGAGGCCCCTG
GCCATCTGGCTTTTCATCTTCAACGTCTCTCAACAGATGGGGGGCTTCTACCTGTGCCAGCCGGGGCCCCCCTCTGAG
AAGGCCTGGCAGCCTGGCTGGACAGTCAATGTGGAGGGCAGCGGGGAGCTGTTCCGGTGGAATGTTTCGGACCTAGGT
GGCCTGGGCTGTGGCCTGAAGAACAGGTCCTCAGAGGGCCCCAGCTCCCCTTCCGGGAAGCTCATGAGCCCCAAGCTG
TATGTGTGGGCCAAAGACCGCCCTGAGATCTGGGAGGGAGAGCCTCCGTGTCTCCCACCGAGGGACAGCCTGAACCAG
AGCCTCAGCCAGGACCTCACCATGGCCCCTGGCTCCACACTCTGGCTGTCCTGTGGGGTACCCCCTGACTCTGTGTCC
AGGGGCCCCCTCTCCTGGACCCATGTGCACCCCAAGGGGCCTAAGTCATTGCTGAGCCTAGAGCTGAAGGACGATCGC
CCGGCCAGAGATATGTGGGTAATGGAGACGGGTCTGTTGTTGCCCCGGGCCACAGCTCAAGACGCTGGAAAGTATTAT
TGTCACCGTGGCAACCTGACCATGTCATTCCACCTGGAGATCACTGCTCGGCCAGTACTATGGCACTGGCTGCTGAGG
ACTGGTGGCTGGAAGGGAGGAGGTGGGTCTGGAGGTGGAGGATCTGGTGGAGGTGGGTCTGGAGGAGGTGGGTCTGAC
ATCCTGATGACCCAATCTCCATCCTCCATGTCTGTATCTCTGGGAGACACAGTCAGCATCACTTGCCATTCAAGTCAG
GACATTAACAGTAATATAGGGTGGTTGCAGCAGAGACCAGGGAAATCATTTAAGGGCCTGATCTATCATGGAACCAAC
TTGGACGATGAAGTTCCATCAAGGTTCAGTGGCAGTGGATCTGGAGCCGATTATTCTCTCACCATCAGCAGCCTGGAA
TCTGAAGATTTTGCAGACTATTACTGTGTACAGTATGCTCAGTTTCCGTGGACGTTCGGTGGAGGCACCAAGCTCGAA
ATCAAACGTGGAGGAGGTGGGTCTGGAGGTGGAGGATCTGGTGGAGGTGGGTCTGGAGGAGGTGGGTCTATGAGAGTG
CTGATTCTTTTGTGGCTGTTCACAGCCTTTCCTGGTGTCCTGTCTGATGTGCAGCTTCAGGAGTCGGGACCTAGCCTG
GTGAAACCTTCTCAGTCTCTGTCCCTCACCTGCACTGTCACTGGCTACTCAATCACCAGTGATTTTGCCTGGAACTGG
ATCCGGCAGTTTCCAGGAAACAAGCTGGAGTGGATGGGCTACATAAGTTATAGTGGTAACACTAGGTACAACCCATCT
CTCAAAAGTCGAATCTCTATCACTCGAGACACATCCAAGAACCAATTCTTCCTGCAGTTGAATTCTGTGACTATTGAG
GACACAGCCACATATTACTGTGTAACGGCGGGACGCGGGTTTCCTTATTGGGGCCAAGGGACTCTGGTCACTGTCTCT
GCACATCATCACCATCACCAT
SEQID NO. 268
ATGCATCTCCTCGGCCCCTGGCTCCTGCTCCTGGTTCTAGAATACTTGGCTTTCTCTGACTCAAGTAAATGGGTTTTT
GAGCACCCTGAAACCCTCTACGCCTGGGAGGGGGCCTGCGTCTGGATCCCCTGCACCTACAGAGCCCTAGATGGTGAC
CTGGAAAGCTTCATCCTGTTCCACAATCCTGAGTATAACAAGAACACCTCGAAGTTTGATGGGACAAGACTCTATGAA
AGCACAAAGGATGGGAAGGTTCCTTCTGAGCAGAAAAGGGTGCAATTCCTGGGAGACAAGAATAAGGCCTGCACACTG
AGTATCCACCCGGTGCACCTCAATGACAGTGGTCAGCTGGGGCTGAGGATGGAGTCCAAGACTGAGAAATGGATGGAA
CGAATACACCTCAATGTCTCTGAAAGGCCTTTTCCACCTCATATCCAGCTCCCTCCAGAAATTCAAGAGTCCCAGGAA
GTCACTCTGACCTGCTTGCTGAATTTCTCCTGCTATGGGTATCCGATCCAATTGCAGTGGCTCCTAGAGGGGGTTCCA
ATGAGGCAGGCTGCTGTCACCTCGACCTCCTTGACCATCAAGTCTGTCTTCACCCGGAGCGAGCTCAAGTTCTCCCCA
CAGTGGAGTCACCATGGGAAGATTGTGACCTGCCAGCTTCAGGATGCAGATGGGAAGTTCCTCTCCAATGACACGGTG
CAGCTGAACGTGAAGCACACCCCGAAGTTGGAGATCAAGGTCACTCCCAGTGATGCCATAGTGAGGGAGGGGGACTCT
GTGACCATGACCTGCGAGGTCAGCAGCAGCAACCCGGAGTACACGACGGTATCCTGGCTCAAGGATGGGACCTCGCTG
AAGAAGCAGAATACATTCACGCTAAACCTGCGCGAAGTGACCAAGGACCAGAGTGGGAAGTACTGCTGTCAGGTCTCC
AATGACGTGGGCCCGGGAAGGTCGGAAGAAGTGTTCCTGCAAGTGCAGTATGCCCCGGAAGGAGGAGGTGGGTCTGGA
GGTGGAGGATCTGGTGGAGGTGGGTCTGGAGGAGGTGGGTCTGACATCCTGATGACCCAATCTCCATCCTCCATGTCT
GTATCTCTGGGAGACACAGTCAGCATCACTTGCCATTCAAGTCAGGACATTAACAGTAATATAGGGTGGTTGCAGCAG
AGACCAGGGAAATCATTTAAGGGCCTGATCTATCATGGAACCAACTTGGACGATGAAGTTCCATCAAGGTTCAGTGGC
AGTGGATCTGGAGCCGATTATTCTCTCACCATCAGCAGCCTGGAATCTGAAGATTTTGCAGACTATTACTGTGTACAG
TATGCTCAGTTTCCGTGGACGTTCGGTGGAGGCACCAAGCTCGAAATCAAACGTGGAGGAGGTGGGTCTGGAGGTGGA
GGATCTGGTGGAGGTGGGTCTGGAGGAGGTGGGTCTATGAGAGTGCTGATTCTTTTGTGGCTGTTCACAGCCTTTCCT
GGTGTCCTGTCTGATGTGCAGCTTCAGGAGTCGGGACCTAGCCTGGTGAAACCTTCTCAGTCTCTGTCCCTCACCTGC
ACTGTCACTGGCTACTCAATCACCAGTGATTTTGCCTGGAACTGGATCCGGCAGTTTCCAGGAAACAAGCTGGAGTGG
ATGGGCTACATAAGTTATAGTGGTAACACTAGGTACAACCCATCTCTCAAAAGTCGAATCTCTATCACTCGAGACACA
TCCAAGAACCAATTCTTCCTGCAGTTGAATTCTGTGACTATTGAGGACACAGCCACATATTACTGTGTAACGGCGGGA
CGCGGGTTTCCTTATTGGGGCCAAGGGACTCTGGTCACTGTCTCTGCACATCATCACCATCACCAT
SEQID NO. 271
ATGCTCAGGCTGCTCTTGGCTCTCAACTTATTCCCTTCAATTCAAGTAACAGGAGACATCCAGATGACACAGACTACA
TCCTCCCTGTCTGCCTCTCTGGGAGACAGAGTCACCATCAGTTGCAGGGCAAGTCAGGACATTAGTAAATATTTAAAT
TGGTATCAGCAGAAACCAGATGGAACTGTTAAACTCCTGATCTACCATACATCAAGATTACACTCAGGAGTCCCATCA
AGGTTCAGTGGCAGTGGGTCTGGAACAGATTATTCTCTCACCATTAGCAACCTGGAGCAAGAAGATATTGCCACTTAC
TTTTGCCAACAGGGTAATACGCTTCCGTACACGTTCGGAGGGGGGACTAAGTTGGAAATAACAGGAGGAGGTGGGTCT
GGAGGTGGAGGATCTGGTGGAGGTGGGTCTGGAGGAGGTGGGTCTGAGGTGAAACTGCAGGAGTCAGGACCTGGCCTG
GTGGCGCCCTCACAGAGCCTGTCCGTCACATGCACTGTCTCAGGGGTCTCATTACCCGACTATGGTGTAAGCTGGATT
CGCCAGCCTCCACGAAAGGGTCTGGAGTGGCTGGGAGTAATATGGGGTAGTGAAACCACATACTATAATTCAGCTCTC
AAATCCAGACTGACCATCATCAAGGACAACTCCAAGAGCCAAGTTTTCTTAAAAATGAACAGTCTGCAAACTGATGAC
ACAGCCATTTACTACTGTGCCAAACATTATTACTACGGTGGTAGCTATGCTATGGACTACTGGGGTCAAGGAACCTCA
GTCACCGTCTCCTCAGACTACAAAGACGATGACGACAAGATTGAAGTTATGTATCCTCCTCCTTACCTAGACAATGAG
AAGAGCAATGGAACCATTATCCATGTGAAAGGGAAACACCTTTGTCCAAGTCCCCTATTTCCCGGACCTTCTAAGCCC
TTTTGGGTGCTGGTGGTGGTTGGTGGAGTCCTGGCTTGCTATAGCTTGCTAGTAACAGTGGCCTTTATTATTTTCTGG
GTGAGGAGTAAGAGGAGCAGGCTCCTGCACAGTGACTACATGAACATGACTCCCCGCCGCCCCGGGCCCACCCGCAAG
CATTACCAGCCCTATGCCCCACCACGCGACTTCGCAGCCTATCGCTCCAAACGGGGCAGAAAGAAACTCCTGTATATA
TTCAAACAACCATTTATGAGACCAGTACAAACTACTCAAGAGGAAGATGGCTGTAGCTGCCGATTTCCAGAAGAAGAA
GAAGGAGGATGTGAACTGAGAGTGAAGTTCAGCAGGAGCGCAGACGCCCCCGCGTACCAGCAGGGCCAGAACCAGCTC
TATAACGAGCTCAATCTAGGACGAAGAGAGGAGTACGATGTTTTGGACAAGAGACGTGGCCGGGACCCTGAGATGGGG
GGAAAGCCGCAGAGAAGGAAGAACCCTCAGGAAGGCCTGTACAATGAACTGCAGAAAGATAAGATGGCGGAGGCCTAC
AGTGAGATTGGGATGAAAGGCGAGCGCCGGAGGGGCAAGGGGCACGATGGCCTTTACCAGGGTCTCAGTACAGCCACC
AAGGACACCTACGACGCCCTTCACATGCAGGCCCTGCCCCCTCGC
SEQID NO. 272
ATGCTCAGGCTGCTCTTGGCTCTCAACTTATTCCCTTCAATTCAAGTAACAGGAGACATCCAGATGACACAGACTACA
TCCTCCCTGTCTGCCTCTCTGGGAGACAGAGTCACCATCAGTTGCAGGGCAAGTCAGGACATTAGTAAATATTTAAAT
TGGTATCAGCAGAAACCAGATGGAACTGTTAAACTCCTGATCTACCATACATCAAGATTACACTCAGGAGTCCCATCA
AGGTTCAGTGGCAGTGGGTCTGGAACAGATTATTCTCTCACCATTAGCAACCTGGAGCAAGAAGATATTGCCACTTAC
TTTTGCCAACAGGGTAATACGCTTCCGTACACGTTCGGAGGGGGGACTAAGTTGGAAATAACAGGAGGAGGTGGGTCT
GGAGGTGGAGGATCTGGTGGAGGTGGGTCTGGAGGAGGTGGGTCTGAGGTGAAACTGCAGGAGTCAGGACCTGGCCTG
GTGGCGCCCTCACAGAGCCTGTCCGTCACATGCACTGTCTCAGGGGTCTCATTACCCGACTATGGTGTAAGCTGGATT
CGCCAGCCTCCACGAAAGGGTCTGGAGTGGCTGGGAGTAATATGGGGTAGTGAAACCACATACTATAATTCAGCTCTC
AAATCCAGACTGACCATCATCAAGGACAACTCCAAGAGCCAAGTTTTCTTAAAAATGAACAGTCTGCAAACTGATGAC
ACAGCCATTTACTACTGTGCCAAACATTATTACTACGGTGGTAGCTATGCTATGGACTACTGGGGTCAAGGAACCTCA
GTCACCGTCTCCTCAGACTACAAAGACGATGACGACAAGATTGAAGTTATGTATCCTCCTCCTTACCTAGACAATGAG
AAGAGCAATGGAACCATTATCCATGTGAAAGGGAAACACCTTTGTCCAAGTCCCCTATTTCCCGGACCTTCTAAGCCC
TTTTGGGTGCTGGTGGTGGTTGGTGGAGTCCTGGCTTGCTATAGCTTGCTAGTAACAGTGGCCTTTATTATTTTCTGG
GTGAGGAGTAAGAGGAGCAGGCTCCTGCACAGTGACTACATGAACATGACTCCCCGCCGCCCCGGGCCCACCCGCAAG
CATTACCAGCCCTATGCCCCACCACGCGACTTCGCAGCCTATCGCTCCAAACGGGGCAGAAAGAAACTCCTGTATATA
TTCAAACAACCATTTATGAGACCAGTACAAACTACTCAAGAGGAAGATGGCTGTAGCTGCCGATTTCCAGAAGAAGAA
GAAGGAGGATGTGAACTGAGAGTGAAGTTCAGCAGGAGCGCAGACGCCCCCGCGTACCAGCAGGGCCAGAACCAGCTC
TATAACGAGCTCAATCTAGGACGAAGAGAGGAGTACGATGTTTTGGACAAGAGACGTGGCCGGGACCCTGAGATGGGG
GGAAAGCCGCAGAGAAGGAAGAACCCTCAGGAAGGCCTGTACAATGAACTGCAGAAAGATAAGATGGCGGAGGCCTAC
AGTGAGATTGGGATGAAAGGCGAGCGCCGGAGGGGCAAGGGGCACGATGGCCTTTACCAGGGTCTCAGTACAGCCACC
AAGGACACCTACGACGCCCTTCACATGCAGGCCCTGCCCCCTCGC
SEQID NO. 273
TATTAATAGTAATCAATTACGGGGTCATTAGTTCATAGCCCATATATGGAGTTCCGCGTTACATAACTTACGGTAAAT
GGCCCGCCTGGCTGACCGCCCAACGACCCCCGCCCATTGACGTCAATAATGACGTATGTTCCCATAGTAACGCCAATA
GGGACTTTCCATTGACGTCAATGGGTGGAGTATTTACGGTAAACTGCCCACTTGGCAGTACATCAAGTGTATCATATG
CCAAGTACGCCCCCTATTGACGTCAATGACGGTAAATGGCCCGCCTGGCATTATGCCCAGTACATGACCTTATGGGAC
TTTCCTACTTGGCAGTACATCTACGTATTAGTCATCGCTATTACCATGGTGATGCGGTTTTGGCAGTACATCAATGGG
CGTGGATAGCGGTTTGACTCACGGGGATTTCCAAGTCTCCACCCCATTGACGTCAATGGGAGTTTGTTTTGGCACCAA
AATCAACGGGACTTTCCAAAATGTCGTAACAACTCCGCCCCATTGACGCAAATGGGCGGTAGGCGTGTACGGTGGGAG
GTCTATATAAGCAGAGCTCGCGGCCGCGCCACCATGCCACCTCCTCGCCTCCTCTTCTTCCTCCTCTTCCTCACCCCC
ATGGAAGTCAGGCCCGAGGAACCTCTAGTGGTGAAGGTGGAAGAGGGAGATAACGCTGTGCTGCAGTGCCTCAAGGGG
ACCTCAGATGGCCCCACTCAGCAGCTGACTTGGTCTCGGGAGTCCCCGCTTAAACCCTTCTTAAAACTCAGCCTGGGG
CTGCCAGGCCTGGGAATCCACATGAGGCCCCTGGCCATCTGGCTTTTCATCTTCAACGTCTCTCAACAGATGGGGGGC
TTCTACCTGTGCCAGCCGGGGCCCCCCTCTGAGAAGGCCTGGCAGCCTGGCTGGACAGTCAATGTGGAGGGCAGCGGG
GAGCTGTTCCGGTGGAATGTTTCGGACCTAGGTGGCCTGGGCTGTGGCCTGAAGAACAGGTCCTCAGAGGGCCCCAGC
TCCCCTTCCGGGAAGCTCATGAGCCCCAAGCTGTATGTGTGGGCCAAAGACCGCCCTGAGATCTGGGAGGGAGAGCCT
CCGTGTCTCCCACCGAGGGACAGCCTGAACCAGAGCCTCAGCCAGGACCTCACCATGGCCCCTGGCTCCACACTCTGG
CTGTCCTGTGGGGTACCCCCTGACTCTGTGTCCAGGGGCCCCCTCTCCTGGACCCATGTGCACCCCAAGGGGCCTAAG
TCATTGCTGAGCCTAGAGCTGAAGGACGATCGCCCGGCCAGAGATATGTGGGTAATGGAGACGGGTCTGTTGTTGCCC
CGGGCCACAGCTCAAGACGCTGGAAAGTATTATTGTCACCGTGGCAACCTGACCATGTCATTCCACCTGGAGATCACT
GCTCGGCCAGGGGGAGGTGGGTCTGGAGGTGGAGGATCTGGTGGAGGTGGGTCTGGTGGAGGTGGGTCTGAGGTGCAG
CTGGTGGAGTCTGGTGGTGGTCTTGTTCAACCCGGTGGTTCTCTTCGTCTTTCTTGTGCTGCTTCTGGTTTTAATATT
AAAGATACTTATATTCATTGGGTTCGTCAAGCTCCTGGTAAAGGTCTTGAATGGGTTGCTCGTATTTATCCTACTAAT
GGTTATACTCGTTATGCTGATTCTGTTAAAGGTCGTTTTACTATTTCTGCTGATACTTCTAAAAATACTGCTTATCTT
CAAATGAACTCTCTTCGTGCTGAAGATACTGCTGTTTATTATTGTTCTCGTTGGGGTGGTGATGGTTTTTATGCTATG
GATTATTGGGGTCAAGGTACTCTTGTCACCGTCTCCTCAGCTAGCACCGGGGGAGGTGGGTCTGGAGGTGGAGGATCT
GGTGGAGGTGGGTCTGACATCCAGATGACCCAGTCTCCTTCTTCTCTTTCTGCTTCTGTTGGTGATCGTGTTACTATT
ACTTGTCGTGCTTCTCAAGATGTTAATACTGCTGTTGCTTGGTATCAACAAAAACCCGGTAAAGCTCCTAAACTTCTT
ATTTATTCTGCTTCTTTTCTTTATTCTGGTGTTCCTTCTCGTTTTTCTGGTTCTCGTTCTGGTACTGATTTTACTCTT
ACTATTTCTTCTCTTCAACCTGAAGATTTTGCTACTTATTATTGTCAACAACATTATACTACTCCTCCTACTTTTGGT
CAAGGTACCAAGGTGGAGATCAAACGTACGCATCATCACCATCACCAT
SEQID NO. 274
GGGAGAAGCTAGACTTAAAATCTTCCATTGCAGCTGTAAACACATCTGGACAATAGTCTGTTTTCTGCATTTGTGAAT
CCCACACCCATGGAACTATGAATCGTGCATCAGAGTTATTTAAAACCACCGTGCATGGAGTGAACCAATACCGAGGTG
TTTGCTTATCATTTTCCTTTGAGCACACAGCACAGCCTTGAACTCAGTGACACTCCTAAGAGGGCTCTAGGGTCAGGC
CAACTTAGATGAGATGCTAGTCTTTAGCTAAAGATGCCCTTCCACCCCCGTTGCACGACCTTGCTTCTCAGTCTTTGT
TGAGTCTTCTGGGGGAGAATCCCCCTAGAGGACTCAGTTTACAAAACCCTAAGTGAGACCACTGCCAAGAAGTGCTTG
CTCACCCCTCCTGCCGCGGCAGGGAATCCCCCTTTCCTTGTACAGGCAAAACACAAAAAAGGACTCATAAGTGAAGCC
TGATCCTTCTCACCAAACACTGCCCACACCTCCTAGTAATTGAACTTGAAAAAAAAAACTGGTTTGAAAAATTACCGC
AAACCATATTGTCATAAAAAAAAAAAAAAACACTTCCTATATGAGATCACAGAACAGAGTAGGCACAAGTTCCTGCTG
AGCAGATCAGCCTAATGCTTAAATAGAACAACTCCTGGCTGTCATTGACATTGTCTAAAAGCCAAGATGACAGACTGA
GAGGCCTGAGCCCTTGTTCTGGCATTCTCCCAGGAAGATGCAGTAAAGGGGTTGACCCAATATACGCGGCCGCGCCAC
CATGCCACCTCCTCGCCTCCTCTTCTTCCTCCTCTTCCTCACCCCCATGGAAGTCAGGCCCGAGGAACCTCTAGTGGT
GAAGGTGGAAGAGGGAGATAACGCTGTGCTGCAGTGCCTCAAGGGGACCTCAGATGGCCCCACTCAGCAGCTGACTTG
GTCTCGGGAGTCCCCGCTTAAACCCTTCTTAAAACTCAGCCTGGGGCTGCCAGGCCTGGGAATCCACATGAGGCCCCT
GGCCATCTGGCTTTTCATCTTCAACGTCTCTCAACAGATGGGGGGCTTCTACCTGTGCCAGCCGGGGCCCCCCTCTGA
GAAGGCCTGGCAGCCTGGCTGGACAGTCAATGTGGAGGGCAGCGGGGAGCTGTTCCGGTGGAATGTTTCGGACCTAGG
TGGCCTGGGCTGTGGCCTGAAGAACAGGTCCTCAGAGGGCCCCAGCTCCCCTTCCGGGAAGCTCATGAGCCCCAAGCT
GTATGTGTGGGCCAAAGACCGCCCTGAGATCTGGGAGGGAGAGCCTCCGTGTCTCCCACCGAGGGACAGCCTGAACCA
GAGCCTCAGCCAGGACCTCACCATGGCCCCTGGCTCCACACTCTGGCTGTCCTGTGGGGTACCCCCTGACTCTGTGTC
CAGGGGCCCCCTCTCCTGGACCCATGTGCACCCCAAGGGGCCTAAGTCATTGCTGAGCCTAGAGCTGAAGGACGATCG
CCCGGCCAGAGATATGTGGGTAATGGAGACGGGTCTGTTGTTGCCCCGGGCCACAGCTCAAGACGCTGGAAAGTATTA
TTGTCACCGTGGCAACCTGACCATGTCATTCCACCTGGAGATCACTGCTCGGCCAGGGGGAGGTGGGTCTGGAGGTGG
AGGATCTGGTGGAGGTGGGTCTGGTGGAGGTGGGTCTGAGGTGCAGCTGGTGGAGTCTGGTGGTGGTCTTGTTCAACC
CGGTGGTTCTCTTCGTCTTTCTTGTGCTGCTTCTGGTTTTAATATTAAAGATACTTATATTCATTGGGTTCGTCAAGC
TCCTGGTAAAGGTCTTGAATGGGTTGCTCGTATTTATCCTACTAATGGTTATACTCGTTATGCTGATTCTGTTAAAGG
TCGTTTTACTATTTCTGCTGATACTTCTAAAAATACTGCTTATCTTCAAATGAACTCTCTTCGTGCTGAAGATACTGC
TGTTTATTATTGTTCTCGTTGGGGTGGTGATGGTTTTTATGCTATGGATTATTGGGGTCAAGGTACTCTTGTCACCGT
CTCCTCAGCTAGCACCGGGGGAGGTGGGTCTGGAGGTGGAGGATCTGGTGGAGGTGGGTCTGACATCCAGATGACCCA
GTCTCCTTCTTCTCTTTCTGCTTCTGTTGGTGATCGTGTTACTATTACTTGTCGTGCTTCTCAAGATGTTAATACTGC
TGTTGCTTGGTATCAACAAAAACCCGGTAAAGCTCCTAAACTTCTTATTTATTCTGCTTCTTTTCTTTATTCTGGTGT
TCCTTCTCGTTTTTCTGGTTCTCGTTCTGGTACTGATTTTACTCTTACTATTTCTTCTCTTCAACCTGAAGATTTTGC
TACTTATTATTGTCAACAACATTATACTACTCCTCCTACTTTTGGTCAAGGTACCAAGGTGGAGATCAAACGTACGCA
TCATCACCATCACCAT
SEQID NO. 275
AATTTAAGGCAGGATGTCTCAGAGTCTGGGAAAATCCCACTTTCCTCCTGCTACACCTTACAGTTGTGAGAAAGCACA
TTTCAGACAACAGGGAAAACCCATACTTCACCACAACAACACACTATACATTGTCTGGTCCACTGGAGCATAAATTAA
AGAGAAACAATGTAGTCAAGCAAGTAGGCGGCAAGAGGAAGGGGGCGGAGACATCATCAGGGAGTATAAACTCTGAGA
TGCCTCAGAGCCTCACAGACTCAACAAGAGCTCCAGCAAAGACTTTCACTGTAGCTTGACTTGACCTGAGATTAACTA
GGGAATCTTGAGAATAAAGGCGGCCGCGCCACCATGCCACCTCCTCGCCTCCTCTTCTTCCTCCTCTTCCTCACCCCC
ATGGAAGTCAGGCCCGAGGAACCTCTAGTGGTGAAGGTGGAAGAGGGAGATAACGCTGTGCTGCAGTGCCTCAAGGGG
ACCTCAGATGGCCCCACTCAGCAGCTGACTTGGTCTCGGGAGTCCCCGCTTAAACCCTTCTTAAAACTCAGCCTGGGG
CTGCCAGGCCTGGGAATCCACATGAGGCCCCTGGCCATCTGGCTTTTCATCTTCAACGTCTCTCAACAGATGGGGGGC
TTCTACCTGTGCCAGCCGGGGCCCCCCTCTGAGAAGGCCTGGCAGCCTGGCTGGACAGTCAATGTGGAGGGCAGCGGG
GAGCTGTTCCGGTGGAATGTTTCGGACCTAGGTGGCCTGGGCTGTGGCCTGAAGAACAGGTCCTCAGAGGGCCCCAGC
TCCCCTTCCGGGAAGCTCATGAGCCCCAAGCTGTATGTGTGGGCCAAAGACCGCCCTGAGATCTGGGAGGGAGAGCCT
CCGTGTCTCCCACCGAGGGACAGCCTGAACCAGAGCCTCAGCCAGGACCTCACCATGGCCCCTGGCTCCACACTCTGG
CTGTCCTGTGGGGTACCCCCTGACTCTGTGTCCAGGGGCCCCCTCTCCTGGACCCATGTGCACCCCAAGGGGCCTAAG
TCATTGCTGAGCCTAGAGCTGAAGGACGATCGCCCGGCCAGAGATATGTGGGTAATGGAGACGGGTCTGTTGTTGCCC
CGGGCCACAGCTCAAGACGCTGGAAAGTATTATTGTCACCGTGGCAACCTGACCATGTCATTCCACCTGGAGATCACT
GCTCGGCCAGGGGGAGGTGGGTCTGGAGGTGGAGGATCTGGTGGAGGTGGGTCTGGTGGAGGTGGGTCTGAGGTGCAG
CTGGTGGAGTCTGGTGGTGGTCTTGTTCAACCCGGTGGTTCTCTTCGTCTTTCTTGTGCTGCTTCTGGTTTTAATATT
AAAGATACTTATATTCATTGGGTTCGTCAAGCTCCTGGTAAAGGTCTTGAATGGGTTGCTCGTATTTATCCTACTAAT
GGTTATACTCGTTATGCTGATTCTGTTAAAGGTCGTTTTACTATTTCTGCTGATACTTCTAAAAATACTGCTTATCTT
CAAATGAACTCTCTTCGTGCTGAAGATACTGCTGTTTATTATTGTTCTCGTTGGGGTGGTGATGGTTTTTATGCTATG
GATTATTGGGGTCAAGGTACTCTTGTCACCGTCTCCTCAGCTAGCACCGGGGGAGGTGGGTCTGGAGGTGGAGGATCT
GGTGGAGGTGGGTCTGACATCCAGATGACCCAGTCTCCTTCTTCTCTTTCTGCTTCTGTTGGTGATCGTGTTACTATT
ACTTGTCGTGCTTCTCAAGATGTTAATACTGCTGTTGCTTGGTATCAACAAAAACCCGGTAAAGCTCCTAAACTTCTT
ATTTATTCTGCTTCTTTTCTTTATTCTGGTGTTCCTTCTCGTTTTTCTGGTTCTCGTTCTGGTACTGATTTTACTCTT
ACTATTTCTTCTCTTCAACCTGAAGATTTTGCTACTTATTATTGTCAACAACATTATACTACTCCTCCTACTTTTGGT
CAAGGTACCAAGGTGGAGATCAAACGTACGCATCATCACCATCACCAT
SEQID NO. 276
TAACGAAGACAGGGCCATGTAGAGGGCCCCAGGGAGTGAAAGGGCCTCCAGGACCTCCAGGTATGGAATACAGGGGAC
GTTTAAGAAGATATGGCCACACACTGGGGCCCTGAGAAGTGAGAGCTTCATGAAAAAAATCAGGGACCCCAGAGTTCC
TTGGAAGCCAAGACTGAAACCAGCATTATGAGTCTCCGGGTCAGAATGAAAGAAGAAGGCCTGCCCCAGTGGGGTCTG
TGAATTCCCGGGGGTGATTTCACTCCCCGGGGCTGTCCCAGGCTTGTCCCTGCTACCCCCACCCAGCCTTTCCTGAGG
CCTCAAGCCTGCCACCAAGCCCCCAGCTCCTTCTCCCCGCAGGGACCCAAACACAGGCCTCGGGACTCAACACAGCTT
TTCCCTCCAACCCCGTTTTCTCTCCCTCAAGGACTCAGCTTTCTGAGGCCCCTCCCAGTTCTAGTTCTATCTTTTTCC
TGCATCCTGTCTGGAAGTTAGAAGGAAACAGACCACAGACCCGGTCCCCAAAAGAAATGGAGGCAATAGGTTTTGAGG
GGCATGGGGACGGGGTTCAGCCTCCAGGGTCCTACACACAAATCAGTCAGTGGCCCAGAAGACCCCCTCGGAATCGGA
GCAGGGAGGATGGGGAGTGTGAGGGGTATCCTTGATGCTTGTGTGTCCCCAACTTTCCAAATCCCCGCCCCCGCGATG
GAGAAGAAACCGAGACAGAAGGTGCAGGGCCCACTACCGCTTCCTCCAGATGAGCTCATGGGTTTCTCCACCAAGGAA
GTTTTCCGCTGGTTGAATGATTCTTTCCCCGCCCTCCTCTCGCCCCAGGGACATATAAAGGCAGTTGTTGGCACACCC
AGCCAGCAGACGCTCCCTCAGCAAGGACAGCAGAGGACCAGCTAAGAGGGAGAGAAGCAACTACAGACCCCCCCTGAA
AACAACCCTCAGACGCCACATCCCCTGACAAGCTGCCAGGCAGGTTCTCTTCCTCTCACATACTGACCCACGGCTCCA
CCCTCTCTCCCCTGGAAAGGACACGCGGCCGCGCCACCATGCCACCTCCTCGCCTCCTCTTCTTCCTCCTCTTCCTCA
CCCCCATGGAAGTCAGGCCCGAGGAACCTCTAGTGGTGAAGGTGGAAGAGGGAGATAACGCTGTGCTGCAGTGCCTCA
AGGGGACCTCAGATGGCCCCACTCAGCAGCTGACTTGGTCTCGGGAGTCCCCGCTTAAACCCTTCTTAAAACTCAGCC
TGGGGCTGCCAGGCCTGGGAATCCACATGAGGCCCCTGGCCATCTGGCTTTTCATCTTCAACGTCTCTCAACAGATGG
GGGGCTTCTACCTGTGCCAGCCGGGGCCCCCCTCTGAGAAGGCCTGGCAGCCTGGCTGGACAGTCAATGTGGAGGGCA
GCGGGGAGCTGTTCCGGTGGAATGTTTCGGACCTAGGTGGCCTGGGCTGTGGCCTGAAGAACAGGTCCTCAGAGGGCC
CCAGCTCCCCTTCCGGGAAGCTCATGAGCCCCAAGCTGTATGTGTGGGCCAAAGACCGCCCTGAGATCTGGGAGGGAG
AGCCTCCGTGTCTCCCACCGAGGGACAGCCTGAACCAGAGCCTCAGCCAGGACCTCACCATGGCCCCTGGCTCCACAC
TCTGGCTGTCCTGTGGGGTACCCCCTGACTCTGTGTCCAGGGGCCCCCTCTCCTGGACCCATGTGCACCCCAAGGGGC
CTAAGTCATTGCTGAGCCTAGAGCTGAAGGACGATCGCCCGGCCAGAGATATGTGGGTAATGGAGACGGGTCTGTTGT
TGCCCCGGGCCACAGCTCAAGACGCTGGAAAGTATTATTGTCACCGTGGCAACCTGACCATGTCATTCCACCTGGAGA
TCACTGCTCGGCCAGGGGGAGGTGGGTCTGGAGGTGGAGGATCTGGTGGAGGTGGGTCTGGTGGAGGTGGGTCTGAGG
TGCAGCTGGTGGAGTCTGGTGGTGGTCTTGTTCAACCCGGTGGTTCTCTTCGTCTTTCTTGTGCTGCTTCTGGTTTTA
ATATTAAAGATACTTATATTCATTGGGTTCGTCAAGCTCCTGGTAAAGGTCTTGAATGGGTTGCTCGTATTTATCCTA
CTAATGGTTATACTCGTTATGCTGATTCTGTTAAAGGTCGTTTTACTATTTCTGCTGATACTTCTAAAAATACTGCTT
ATCTTCAAATGAACTCTCTTCGTGCTGAAGATACTGCTGTTTATTATTGTTCTCGTTGGGGTGGTGATGGTTTTTATG
CTATGGATTATTGGGGTCAAGGTACTCTTGTCACCGTCTCCTCAGCTAGCACCGGGGGAGGTGGGTCTGGAGGTGGAG
GATCTGGTGGAGGTGGGTCTGACATCCAGATGACCCAGTCTCCTTCTTCTCTTTCTGCTTCTGTTGGTGATCGTGTTA
CTATTACTTGTCGTGCTTCTCAAGATGTTAATACTGCTGTTGCTTGGTATCAACAAAAACCCGGTAAAGCTCCTAAAC
TTCTTATTTATTCTGCTTCTTTTCTTTATTCTGGTGTTCCTTCTCGTTTTTCTGGTTCTCGTTCTGGTACTGATTTTA
CTCTTACTATTTCTTCTCTTCAACCTGAAGATTTTGCTACTTATTATTGTCAACAACATTATACTACTCCTCCTACTT
TTGGTCAAGGTACCAAGGTGGAGATCAAACGTACGCATCATCACCATCACCAT
SEQID NO. 277
GATATCGAATTAGGAGGAAAACTGTTTCATACAGAAGGCGTCAATTAGGAGGAAAAACTGTTTCATACAGAAGGCGTC
AATTAGGAGGAAAAACTGTTTCATACAGAAGGCGTCAATTGGTCCCATCGAATTAGGAGGAAAAACTGTTTCATACAG
AAGGCGTCAATTAGGAGGAAAAACTGTTTCATACAGAAGGCGTCAATTAGGAGGAAAAACTGTTTCATACAGAAGGCG
TCAATTGGTCCCGGGACATTTTGACACCCCCATAATATTTTTCCAGAATTAACAGTATAAATTGCATCTCTTGTTCAA
GAGTTCCCTATCACTCTCTTTAATCACTACTCACAGTAACCTCAACTCCTGGCGGCCGCGCCACCATGCCACCTCCTC
GCCTCCTCTTCTTCCTCCTCTTCCTCACCCCCATGGAAGTCAGGCCCGAGGAACCTCTAGTGGTGAAGGTGGAAGAGG
GAGATAACGCTGTGCTGCAGTGCCTCAAGGGGACCTCAGATGGCCCCACTCAGCAGCTGACTTGGTCTCGGGAGTCCC
CGCTTAAACCCTTCTTAAAACTCAGCCTGGGGCTGCCAGGCCTGGGAATCCACATGAGGCCCCTGGCCATCTGGCTTT
TCATCTTCAACGTCTCTCAACAGATGGGGGGCTTCTACCTGTGCCAGCCGGGGCCCCCCTCTGAGAAGGCCTGGCAGC
CTGGCTGGACAGTCAATGTGGAGGGCAGCGGGGAGCTGTTCCGGTGGAATGTTTCGGACCTAGGTGGCCTGGGCTGTG
GCCTGAAGAACAGGTCCTCAGAGGGCCCCAGCTCCCCTTCCGGGAAGCTCATGAGCCCCAAGCTGTATGTGTGGGCCA
AAGACCGCCCTGAGATCTGGGAGGGAGAGCCTCCGTGTCTCCCACCGAGGGACAGCCTGAACCAGAGCCTCAGCCAGG
ACCTCACCATGGCCCCTGGCTCCACACTCTGGCTGTCCTGTGGGGTACCCCCTGACTCTGTGTCCAGGGGCCCCCTCT
CCTGGACCCATGTGCACCCCAAGGGGCCTAAGTCATTGCTGAGCCTAGAGCTGAAGGACGATCGCCCGGCCAGAGATA
TGTGGGTAATGGAGACGGGTCTGTTGTTGCCCCGGGCCACAGCTCAAGACGCTGGAAAGTATTATTGTCACCGTGGCA
ACCTGACCATGTCATTCCACCTGGAGATCACTGCTCGGCCAGGGGGAGGTGGGTCTGGAGGTGGAGGATCTGGTGGAG
GTGGGTCTGGTGGAGGTGGGTCTGAGGTGCAGCTGGTGGAGTCTGGTGGTGGTCTTGTTCAACCCGGTGGTTCTCTTC
GTCTTTCTTGTGCTGCTTCTGGTTTTAATATTAAAGATACTTATATTCATTGGGTTCGTCAAGCTCCTGGTAAAGGTC
TTGAATGGGTTGCTCGTATTTATCCTACTAATGGTTATACTCGTTATGCTGATTCTGTTAAAGGTCGTTTTACTATTT
CTGCTGATACTTCTAAAAATACTGCTTATCTTCAAATGAACTCTCTTCGTGCTGAAGATACTGCTGTTTATTATTGTT
CTCGTTGGGGTGGTGATGGTTTTTATGCTATGGATTATTGGGGTCAAGGTACTCTTGTCACCGTCTCCTCAGCTAGCA
CCGGGGGAGGTGGGTCTGGAGGTGGAGGATCTGGTGGAGGTGGGTCTGACATCCAGATGACCCAGTCTCCTTCTTCTC
TTTCTGCTTCTGTTGGTGATCGTGTTACTATTACTTGTCGTGCTTCTCAAGATGTTAATACTGCTGTTGCTTGGTATC
AACAAAAACCCGGTAAAGCTCCTAAACTTCTTATTTATTCTGCTTCTTTTCTTTATTCTGGTGTTCCTTCTCGTTTTT
CTGGTTCTCGTTCTGGTACTGATTTTACTCTTACTATTTCTTCTCTTCAACCTGAAGATTTTGCTACTTATTATTGTC
AACAACATTATACTACTCCTCCTACTTTTGGTCAAGGTACCAAGGTGGAGATCAAACGTACGCATCATCACCATCACC
AT
SEQID NO. 278
ATGGATTTTCAGGTGCAGATTTTCAGCTTCCTGCTAATCAGTGCCTCAGTCATAATGTCTAGAATGGCCCAGGTCAAA
CTACAGGAGTCAGGGGCTGAGCTGGTGAAGCCTGGGGCCTCAGTGAAGATGTCCTGCAAGGCTTCTGGCTACACATTT
ACCAGTTACAATATGCACTGGGTAAAGCAGACACCTGGACAGGGCCTGGAATGGATTGGAGCTATTTATCCAGGAAAT
GGTGATACTTCCTACAATCAGAAGTTCAAAGGCAAGGCCACATTGACTGCAGACAAATCCTCCAGCACAGCCTACATG
CAGCTCAGCAGCCTGACATCTGAGGACTCTGCGGACTATTACTGTGCAAGATCTAATTATTACGGTAGTAGCTACTGG
TTCTTCGATGTCTGGGGCCAAGGGACCACGGTCACCGTCTCCTCAGGTGGAGGCGGTTCAGGCGGAGGTGGCTCTGGC
GGTGGCGGATCGGACATCGAGCTCACTCAGTCTCCAACAATCCTGTCTGCATCTCCAGGGGAGAAGGTCACAATGACT
TGCAGGGCCAGCTCAAGTGTAAATTACATGGACTGGTACCAGAAGAAGCCAGGATCCTCCCCCAAACCCTGGATTTAT
GCCACATCCAACCTGGCTTCTGGAGTCCCTGCTCGCTTCAGTGGCAGTGGGTCTGGGACCTCTTACTCTCTCACAATC
AGCAGAGTGGAGGCTGAAGATGCTGCCACTTATTACTGCCAGCAGTGGAGTTTTAATCCACCCACGTTCGGAGGGGGG
ACAAAGTTGGAAATAAAACGGGCCGCCGCTGGTGATCCCGCCGAGCCCAAATCTCCTGACAAAACTCACACATGCCCA
CCGTGCCCAGCACCTGAACTCCTGGGGGGACCGTCAGTCTTCCTCTTCCCCCCAAAACCCAAGGACACCCTCATGATC
TCCCGGACCCCTGAGGTCACATGCGTGGTGGTGGACGTGAGCCACGAAGACCCTGAGGTCAAGTTCAACTGGTACGTG
GACGGCGTGGAGGTGCATAATGCCAAGACAAAGCCGCGGGAGGAGCAGTACAACAGCACGTACCGTGTGGTCAGCGTC
CTCACCGTCCTGCACCAGGACTGGCTGAATGGCAAGGAGTACAAGTGCAAGGTCTCCAACAAAGCCCTCCCAGCCCCC
ATCGAGAAAACCATCTCCAAAGCCAAAGGGCAGCCCCGAGAACCACAGGTGTACACCCTGCCCCCATCCCGGGAGGAG
ATGACCAAGAACCAGGTCAGCCTGACCTGCCTGGTCAAAGGCTTCTATCCCAGCGACATCGCCGTGGAGTGGGAGAGC
AATGGGCAGCCGGAGAACAACTACAAGACCACGCCTCCCGTGCTGGACTCCGACGGCTCCTTCTTCCTCTACAGCAAG
CTCACCGTGGACAAGAGCAGGTGGCAGCAGGGGAACGTCTTCTCATGCTCCGTGATGCACGAGGCTCTGCACAACCAC
TACACGCAGAAGAGCCTCTCCCTGTCTCCGGGT
SEQID NO. 279
ATGGATTTTCAGGTGCAGATTTTCAGCTTCCTGCTAATCAGTGCCTCAGTCATAATGTCTAGAATGGCCCAGGTCAAA
CTACAGGAGTCAGGGGCTGAGCTGGTGAAGCCTGGGGCCTCAGTGAAGATGTCCTGCAAGGCTTCTGGCTACACATTT
ACCAGTTACAATATGCACTGGGTAAAGCAGACACCTGGACAGGGCCTGGAATGGATTGGAGCTATTTATCCAGGAAAT
GGTGATACTTCCTACAATCAGAAGTTCAAAGGCAAGGCCACATTGACTGCAGACAAATCCTCCAGCACAGCCTACATG
CAGCTCAGCAGCCTGACATCTGAGGACTCTGCGGACTATTACTGTGCAAGATCTAATTATTACGGTAGTAGCTACTGG
TTCTTCGATGTCTGGGGCCAAGGGACCACGGTCACCGTCTCCTCAGGTGGAGGCGGTTCAGGCGGAGGTGGCTCTGGC
GGTGGCGGATCGGACATCGAGCTCACTCAGTCTCCAACAATCCTGTCTGCATCTCCAGGGGAGAAGGTCACAATGACT
TGCAGGGCCAGCTCAAGTGTAAATTACATGGACTGGTACCAGAAGAAGCCAGGATCCTCCCCCAAACCCTGGATTTAT
GCCACATCCAACCTGGCTTCTGGAGTCCCTGCTCGCTTCAGTGGCAGTGGGTCTGGGACCTCTTACTCTCTCACAATC
AGCAGAGTGGAGGCTGAAGATGCTGCCACTTATTACTGCCAGCAGTGGAGTTTTAATCCACCCACGTTCGGAGGGGGG
ACAAAGTTGGAAATAAAACGGGCCGCCGCTCATCATCACCATCACCAT
SEQID NO. 280
ATGGATTTTCAGGTGCAGATTTTCAGCTTCCTGCTAATCAGTGCCTCAGTCATAATGTCTAGAGACATCGAGCTCACT
CAGTCTCCAACAATCCTGTCTGCATCTCCAGGGGAGAAGGTCACAATGACTTGCAGGGCCAGCTCAAGTGTAAATTAC
ATGGACTGGTACCAGAAGAAGCCAGGATCCTCCCCCAAACCCTGGATTTATGCCACATCCAACCTGGCTTCTGGAGTC
CCTGCTCGCTTCAGTGGCAGTGGGTCTGGGACCTCTTACTCTCTCACAATCAGCAGAGTGGAGGCTGAAGATGCTGCC
ACTTATTACTGCCAGCAGTGGAGTTTTAATCCACCCACGTTCGGAGGGGGGACAAAGTTGGAAATAAAACGGGGTGGA
GGCGGTTCAGGCGGAGGTGGCTCTGGCGGTGGCGGATCGATGGCCCAGGTCAAACTACAGGAGTCAGGGGCTGAGCTG
GTGAAGCCTGGGGCCTCAGTGAAGATGTCCTGCAAGGCTTCTGGCTACACATTTACCAGTTACAATATGCACTGGGTA
AAGCAGACACCTGGACAGGGCCTGGAATGGATTGGAGCTATTTATCCAGGAAATGGTGATACTTCCTACAATCAGAAG
TTCAAAGGCAAGGCCACATTGACTGCAGACAAATCCTCCAGCACAGCCTACATGCAGCTCAGCAGCCTGACATCTGAG
GACTCTGCGGACTATTACTGTGCAAGATCTAATTATTACGGTAGTAGCTACTGGTTCTTCGATGTCTGGGGCCAAGGG
ACCACGGTCACCGTCTCCTCAGCCGCCGCTGGTGATCCCGCCGAGCCCAAATCTCCTGACAAAACTCACACATGCCCA
CCGTGCCCAGCACCTGAACTCCTGGGGGGACCGTCAGTCTTCCTCTTCCCCCCAAAACCCAAGGACACCCTCATGATC
TCCCGGACCCCTGAGGTCACATGCGTGGTGGTGGACGTGAGCCACGAAGACCCTGAGGTCAAGTTCAACTGGTACGTG
GACGGCGTGGAGGTGCATAATGCCAAGACAAAGCCGCGGGAGGAGCAGTACAACAGCACGTACCGTGTGGTCAGCGTC
CTCACCGTCCTGCACCAGGACTGGCTGAATGGCAAGGAGTACAAGTGCAAGGTCTCCAACAAAGCCCTCCCAGCCCCC
ATCGAGAAAACCATCTCCAAAGCCAAAGGGCAGCCCCGAGAACCACAGGTGTACACCCTGCCCCCATCCCGGGAGGAG
ATGACCAAGAACCAGGTCAGCCTGACCTGCCTGGTCAAAGGCTTCTATCCCAGCGACATCGCCGTGGAGTGGGAGAGC
AATGGGCAGCCGGAGAACAACTACAAGACCACGCCTCCCGTGCTGGACTCCGACGGCTCCTTCTTCCTCTACAGCAAG
CTCACCGTGGACAAGAGCAGGTGGCAGCAGGGGAACGTCTTCTCATGCTCCGTGATGCACGAGGCTCTGCACAACCAC
TACACGCAGAAGAGCCTCTCCCTGTCTCCGGGT
SEQID NO. 281
ATGGATTTTCAGGTGCAGATTTTCAGCTTCCTGCTAATCAGTGCCTCAGTCATAATGTCTAGAGACATCGAGCTCACT
CAGTCTCCAACAATCCTGTCTGCATCTCCAGGGGAGAAGGTCACAATGACTTGCAGGGCCAGCTCAAGTGTAAATTAC
ATGGACTGGTACCAGAAGAAGCCAGGATCCTCCCCCAAACCCTGGATTTATGCCACATCCAACCTGGCTTCTGGAGTC
CCTGCTCGCTTCAGTGGCAGTGGGTCTGGGACCTCTTACTCTCTCACAATCAGCAGAGTGGAGGCTGAAGATGCTGCC
ACTTATTACTGCCAGCAGTGGAGTTTTAATCCACCCACGTTCGGAGGGGGGACAAAGTTGGAAATAAAACGGGGTGGA
GGCGGTTCAGGCGGAGGTGGCTCTGGCGGTGGCGGATCGATGGCCCAGGTCAAACTACAGGAGTCAGGGGCTGAGCTG
GTGAAGCCTGGGGCCTCAGTGAAGATGTCCTGCAAGGCTTCTGGCTACACATTTACCAGTTACAATATGCACTGGGTA
AAGCAGACACCTGGACAGGGCCTGGAATGGATTGGAGCTATTTATCCAGGAAATGGTGATACTTCCTACAATCAGAAG
TTCAAAGGCAAGGCCACATTGACTGCAGACAAATCCTCCAGCACAGCCTACATGCAGCTCAGCAGCCTGACATCTGAG
GACTCTGCGGACTATTACTGTGCAAGATCTAATTATTACGGTAGTAGCTACTGGTTCTTCGATGTCTGGGGCCAAGGG
ACCACGGTCACCGTCTCCTCAGCCGCCGCTCATCATCACCATCACCAT
SEQID NO. 282
ATGCCACCTCCTCGCCTCCTCTTCTTCCTCCTCTTCCTCACCCCCATGGAAGTCAGGCCCGAGGAACCTCTAGTGGTG
AAGGTGGAAGAGGGAGATAACGCTGTGCTGCAGTGCCTCAAGGGGACCTCAGATGGCCCCACTCAGCAGCTGACCTGG
TCTCGGGAGTCCCCGCTTAAACCCTTCTTAAAACTCAGCCTGGGGCTGCCAGGCCTGGGAATCCACATGAGGCCCCTG
GCCATCTGGCTTTTCATCTTCAACGTCTCTCAACAGATGGGGGGCTTCTACCTGTGCCAGCCGGGGCCCCCCTCTGAG
AAGGCCTGGCAGCCTGGCTGGACAGTCAATGTGGAGGGCAGCGGGGAGCTGTTCCGGTGGAATGTTTCGGACCTAGGT
GGCCTGGGCTGTGGCCTGAAGAACAGGTCCTCAGAGGGCCCCAGCTCCCCTTCCGGGAAGCTCATGAGCCCCAAGCTG
TATGTGTGGGCCAAAGACCGCCCTGAGATCTGGGAGGGAGAGCCTCCGTGTCTCCCACCGAGGGACAGCCTGAACCAG
AGCCTCAGCCAGGACCTCACCATGGCCCCTGGCTCCACACTCTGGCTGTCCTGTGGGGTACCCCCTGACTCTGTGTCC
AGGGGCCCCCTCTCCTGGACCCATGTGCACCCCAAGGGGCCTAAGTCATTGCTGAGCCTAGAGCTGAAGGACGATCGC
CCGGCCAGAGATATGTGGGTAATGGAGACGGGTCTGTTGTTGCCCCGGGCCACAGCTCAAGACGCTGGAAAGTATTAT
TGTCACCGTGGCAACCTGACCATGTCATTCCACCTGGAGATCACTGCTCGGCCAGGAGGAGGTGGGTCTGGAGGTGGA
GGATCTGGTGGAGGTGGGTCTGGAGGAGGTGGGTCTATGGCCCAGGTCAAACTACAGGAGTCAGGGGCTGAGCTGGTG
AAGCCTGGGGCCTCAGTGAAGATGTCCTGCAAGGCTTCTGGCTACACATTTACCAGTTACAATATGCACTGGGTAAAG
CAGACACCTGGACAGGGCCTGGAATGGATTGGAGCTATTTATCCAGGAAATGGTGATACTTCCTACAATCAGAAGTTC
AAAGGCAAGGCCACATTGACTGCAGACAAATCCTCCAGCACAGCCTACATGCAGCTCAGCAGCCTGACATCTGAGGAC
TCTGCGGACTATTACTGTGCAAGATCTAATTATTACGGTAGTAGCTACTGGTTCTTCGATGTCTGGGGCCAAGGGACC
ACGGTCACCGTCTCCTCAGGTGGAGGCGGTTCAGGCGGAGGTGGCTCTGGCGGTGGCGGATCGGACATCGAGCTCACT
CAGTCTCCAACAATCCTGTCTGCATCTCCAGGGGAGAAGGTCACAATGACTTGCAGGGCCAGCTCAAGTGTAAATTAC
ATGGACTGGTACCAGAAGAAGCCAGGATCCTCCCCCAAACCCTGGATTTATGCCACATCCAACCTGGCTTCTGGAGTC
CCTGCTCGCTTCAGTGGCAGTGGGTCTGGGACCTCTTACTCTCTCACAATCAGCAGAGTGGAGGCTGAAGATGCTGCC
ACTTATTACTGCCAGCAGTGGAGTTTTAATCCACCCACGTTCGGAGGGGGGACAAAGTTGGAAATAAAACGGGCCGCC
GCTGGTGATCCCGCCGAGCCCAAATCTCCTGACAAAACTCACACATGCCCACCGTGCCCAGCACCTGAACTCCTGGGG
GGACCGTCAGTCTTCCTCTTCCCCCCAAAACCCAAGGACACCCTCATGATCTCCCGGACCCCTGAGGTCACATGCGTG
GTGGTGGACGTGAGCCACGAAGACCCTGAGGTCAAGTTCAACTGGTACGTGGACGGCGTGGAGGTGCATAATGCCAAG
ACAAAGCCGCGGGAGGAGCAGTACAACAGCACGTACCGTGTGGTCAGCGTCCTCACCGTCCTGCACCAGGACTGGCTG
AATGGCAAGGAGTACAAGTGCAAGGTCTCCAACAAAGCCCTCCCAGCCCCCATCGAGAAAACCATCTCCAAAGCCAAA
GGGCAGCCCCGAGAACCACAGGTGTACACCCTGCCCCCATCCCGGGAGGAGATGACCAAGAACCAGGTCAGCCTGACC
TGCCTGGTCAAAGGCTTCTATCCCAGCGACATCGCCGTGGAGTGGGAGAGCAATGGGCAGCCGGAGAACAACTACAAG
ACCACGCCTCCCGTGCTGGACTCCGACGGCTCCTTCTTCCTCTACAGCAAGCTCACCGTGGACAAGAGCAGGTGGCAG
CAGGGGAACGTCTTCTCATGCTCCGTGATGCACGAGGCTCTGCACAACCACTACACGCAGAAGAGCCTCTCCCTGTCT
CCGGGT
SEQID NO. 283
ATGCCACCTCCTCGCCTCCTCTTCTTCCTCCTCTTCCTCACCCCCATGGAAGTCAGGCCCGAGGAACCTCTAGTGGTG
AAGGTGGAAGAGGGAGATAACGCTGTGCTGCAGTGCCTCAAGGGGACCTCAGATGGCCCCACTCAGCAGCTGACCTGG
TCTCGGGAGTCCCCGCTTAAACCCTTCTTAAAACTCAGCCTGGGGCTGCCAGGCCTGGGAATCCACATGAGGCCCCTG
GCCATCTGGCTTTTCATCTTCAACGTCTCTCAACAGATGGGGGGCTTCTACCTGTGCCAGCCGGGGCCCCCCTCTGAG
AAGGCCTGGCAGCCTGGCTGGACAGTCAATGTGGAGGGCAGCGGGGAGCTGTTCCGGTGGAATGTTTCGGACCTAGGT
GGCCTGGGCTGTGGCCTGAAGAACAGGTCCTCAGAGGGCCCCAGCTCCCCTTCCGGGAAGCTCATGAGCCCCAAGCTG
TATGTGTGGGCCAAAGACCGCCCTGAGATCTGGGAGGGAGAGCCTCCGTGTCTCCCACCGAGGGACAGCCTGAACCAG
AGCCTCAGCCAGGACCTCACCATGGCCCCTGGCTCCACACTCTGGCTGTCCTGTGGGGTACCCCCTGACTCTGTGTCC
AGGGGCCCCCTCTCCTGGACCCATGTGCACCCCAAGGGGCCTAAGTCATTGCTGAGCCTAGAGCTGAAGGACGATCGC
CCGGCCAGAGATATGTGGGTAATGGAGACGGGTCTGTTGTTGCCCCGGGCCACAGCTCAAGACGCTGGAAAGTATTAT
TGTCACCGTGGCAACCTGACCATGTCATTCCACCTGGAGATCACTGCTCGGCCAGGAGGAGGTGGGTCTGGAGGTGGA
GGATCTGGTGGAGGTGGGTCTGGAGGAGGTGGGTCTATGGCCCAGGTCAAACTACAGGAGTCAGGGGCTGAGCTGGTG
AAGCCTGGGGCCTCAGTGAAGATGTCCTGCAAGGCTTCTGGCTACACATTTACCAGTTACAATATGCACTGGGTAAAG
CAGACACCTGGACAGGGCCTGGAATGGATTGGAGCTATTTATCCAGGAAATGGTGATACTTCCTACAATCAGAAGTTC
AAAGGCAAGGCCACATTGACTGCAGACAAATCCTCCAGCACAGCCTACATGCAGCTCAGCAGCCTGACATCTGAGGAC
TCTGCGGACTATTACTGTGCAAGATCTAATTATTACGGTAGTAGCTACTGGTTCTTCGATGTCTGGGGCCAAGGGACC
ACGGTCACCGTCTCCTCAGGTGGAGGCGGTTCAGGCGGAGGTGGCTCTGGCGGTGGCGGATCGGACATCGAGCTCACT
CAGTCTCCAACAATCCTGTCTGCATCTCCAGGGGAGAAGGTCACAATGACTTGCAGGGCCAGCTCAAGTGTAAATTAC
ATGGACTGGTACCAGAAGAAGCCAGGATCCTCCCCCAAACCCTGGATTTATGCCACATCCAACCTGGCTTCTGGAGTC
CCTGCTCGCTTCAGTGGCAGTGGGTCTGGGACCTCTTACTCTCTCACAATCAGCAGAGTGGAGGCTGAAGATGCTGCC
ACTTATTACTGCCAGCAGTGGAGTTTTAATCCACCCACGTTCGGAGGGGGGACAAAGTTGGAAATAAAACGGGCCGCC
GCTCATCATCACCATCACCAT
SEQID NO. 284
ATGCCACCTCCTCGCCTCCTCTTCTTCCTCCTCTTCCTCACCCCCATGGAAGTCAGGCCCGAGGAACCTCTAGTGGTG
AAGGTGGAAGAGGGAGATAACGCTGTGCTGCAGTGCCTCAAGGGGACCTCAGATGGCCCCACTCAGCAGCTGACCTGG
TCTCGGGAGTCCCCGCTTAAACCCTTCTTAAAACTCAGCCTGGGGCTGCCAGGCCTGGGAATCCACATGAGGCCCCTG
GCCATCTGGCTTTTCATCTTCAACGTCTCTCAACAGATGGGGGGCTTCTACCTGTGCCAGCCGGGGCCCCCCTCTGAG
AAGGCCTGGCAGCCTGGCTGGACAGTCAATGTGGAGGGCAGCGGGGAGCTGTTCCGGTGGAATGTTTCGGACCTAGGT
GGCCTGGGCTGTGGCCTGAAGAACAGGTCCTCAGAGGGCCCCAGCTCCCCTTCCGGGAAGCTCATGAGCCCCAAGCTG
TATGTGTGGGCCAAAGACCGCCCTGAGATCTGGGAGGGAGAGCCTCCGTGTCTCCCACCGAGGGACAGCCTGAACCAG
AGCCTCAGCCAGGACCTCACCATGGCCCCTGGCTCCACACTCTGGCTGTCCTGTGGGGTACCCCCTGACTCTGTGTCC
AGGGGCCCCCTCTCCTGGACCCATGTGCACCCCAAGGGGCCTAAGTCATTGCTGAGCCTAGAGCTGAAGGACGATCGC
CCGGCCAGAGATATGTGGGTAATGGAGACGGGTCTGTTGTTGCCCCGGGCCACAGCTCAAGACGCTGGAAAGTATTAT
TGTCACCGTGGCAACCTGACCATGTCATTCCACCTGGAGATCACTGCTCGGCCAGGAGGAGGTGGGTCTGGAGGTGGA
GGATCTGGTGGAGGTGGGTCTGGAGGAGGTGGGTCTGACATCGAGCTCACTCAGTCTCCAACAATCCTGTCTGCATCT
CCAGGGGAGAAGGTCACAATGACTTGCAGGGCCAGCTCAAGTGTAAATTACATGGACTGGTACCAGAAGAAGCCAGGA
TCCTCCCCCAAACCCTGGATTTATGCCACATCCAACCTGGCTTCTGGAGTCCCTGCTCGCTTCAGTGGCAGTGGGTCT
GGGACCTCTTACTCTCTCACAATCAGCAGAGTGGAGGCTGAAGATGCTGCCACTTATTACTGCCAGCAGTGGAGTTTT
AATCCACCCACGTTCGGAGGGGGGACAAAGTTGGAAATAAAACGGGGTGGAGGCGGTTCAGGCGGAGGTGGCTCTGGC
GGTGGCGGATCGATGGCCCAGGTCAAACTACAGGAGTCAGGGGCTGAGCTGGTGAAGCCTGGGGCCTCAGTGAAGATG
TCCTGCAAGGCTTCTGGCTACACATTTACCAGTTACAATATGCACTGGGTAAAGCAGACACCTGGACAGGGCCTGGAA
TGGATTGGAGCTATTTATCCAGGAAATGGTGATACTTCCTACAATCAGAAGTTCAAAGGCAAGGCCACATTGACTGCA
GACAAATCCTCCAGCACAGCCTACATGCAGCTCAGCAGCCTGACATCTGAGGACTCTGCGGACTATTACTGTGCAAGA
TCTAATTATTACGGTAGTAGCTACTGGTTCTTCGATGTCTGGGGCCAAGGGACCACGGTCACCGTCTCCTCAGCCGCC
GCTGGTGATCCCGCCGAGCCCAAATCTCCTGACAAAACTCACACATGCCCACCGTGCCCAGCACCTGAACTCCTGGGG
GGACCGTCAGTCTTCCTCTTCCCCCCAAAACCCAAGGACACCCTCATGATCTCCCGGACCCCTGAGGTCACATGCGTG
GTGGTGGACGTGAGCCACGAAGACCCTGAGGTCAAGTTCAACTGGTACGTGGACGGCGTGGAGGTGCATAATGCCAAG
ACAAAGCCGCGGGAGGAGCAGTACAACAGCACGTACCGTGTGGTCAGCGTCCTCACCGTCCTGCACCAGGACTGGCTG
AATGGCAAGGAGTACAAGTGCAAGGTCTCCAACAAAGCCCTCCCAGCCCCCATCGAGAAAACCATCTCCAAAGCCAAA
GGGCAGCCCCGAGAACCACAGGTGTACACCCTGCCCCCATCCCGGGAGGAGATGACCAAGAACCAGGTCAGCCTGACC
TGCCTGGTCAAAGGCTTCTATCCCAGCGACATCGCCGTGGAGTGGGAGAGCAATGGGCAGCCGGAGAACAACTACAAG
ACCACGCCTCCCGTGCTGGACTCCGACGGCTCCTTCTTCCTCTACAGCAAGCTCACCGTGGACAAGAGCAGGTGGCAG
CAGGGGAACGTCTTCTCATGCTCCGTGATGCACGAGGCTCTGCACAACCACTACACGCAGAAGAGCCTCTCCCTGTCT
CCGGGT
SEQID NO. 285
ATGCCACCTCCTCGCCTCCTCTTCTTCCTCCTCTTCCTCACCCCCATGGAAGTCAGGCCCGAGGAACCTCTAGTGGTG
AAGGTGGAAGAGGGAGATAACGCTGTGCTGCAGTGCCTCAAGGGGACCTCAGATGGCCCCACTCAGCAGCTGACCTGG
TCTCGGGAGTCCCCGCTTAAACCCTTCTTAAAACTCAGCCTGGGGCTGCCAGGCCTGGGAATCCACATGAGGCCCCTG
GCCATCTGGCTTTTCATCTTCAACGTCTCTCAACAGATGGGGGGCTTCTACCTGTGCCAGCCGGGGCCCCCCTCTGAG
AAGGCCTGGCAGCCTGGCTGGACAGTCAATGTGGAGGGCAGCGGGGAGCTGTTCCGGTGGAATGTTTCGGACCTAGGT
GGCCTGGGCTGTGGCCTGAAGAACAGGTCCTCAGAGGGCCCCAGCTCCCCTTCCGGGAAGCTCATGAGCCCCAAGCTG
TATGTGTGGGCCAAAGACCGCCCTGAGATCTGGGAGGGAGAGCCTCCGTGTCTCCCACCGAGGGACAGCCTGAACCAG
AGCCTCAGCCAGGACCTCACCATGGCCCCTGGCTCCACACTCTGGCTGTCCTGTGGGGTACCCCCTGACTCTGTGTCC
AGGGGCCCCCTCTCCTGGACCCATGTGCACCCCAAGGGGCCTAAGTCATTGCTGAGCCTAGAGCTGAAGGACGATCGC
CCGGCCAGAGATATGTGGGTAATGGAGACGGGTCTGTTGTTGCCCCGGGCCACAGCTCAAGACGCTGGAAAGTATTAT
TGTCACCGTGGCAACCTGACCATGTCATTCCACCTGGAGATCACTGCTCGGCCAGGAGGAGGTGGGTCTGGAGGTGGA
GGATCTGGTGGAGGTGGGTCTGGAGGAGGTGGGTCTGACATCGAGCTCACTCAGTCTCCAACAATCCTGTCTGCATCT
CCAGGGGAGAAGGTCACAATGACTTGCAGGGCCAGCTCAAGTGTAAATTACATGGACTGGTACCAGAAGAAGCCAGGA
TCCTCCCCCAAACCCTGGATTTATGCCACATCCAACCTGGCTTCTGGAGTCCCTGCTCGCTTCAGTGGCAGTGGGTCT
GGGACCTCTTACTCTCTCACAATCAGCAGAGTGGAGGCTGAAGATGCTGCCACTTATTACTGCCAGCAGTGGAGTTTT
AATCCACCCACGTTCGGAGGGGGGACAAAGTTGGAAATAAAACGGGGTGGAGGCGGTTCAGGCGGAGGTGGCTCTGGC
GGTGGCGGATCGATGGCCCAGGTCAAACTACAGGAGTCAGGGGCTGAGCTGGTGAAGCCTGGGGCCTCAGTGAAGATG
TCCTGCAAGGCTTCTGGCTACACATTTACCAGTTACAATATGCACTGGGTAAAGCAGACACCTGGACAGGGCCTGGAA
TGGATTGGAGCTATTTATCCAGGAAATGGTGATACTTCCTACAATCAGAAGTTCAAAGGCAAGGCCACATTGACTGCA
GACAAATCCTCCAGCACAGCCTACATGCAGCTCAGCAGCCTGACATCTGAGGACTCTGCGGACTATTACTGTGCAAGA
TCTAATTATTACGGTAGTAGCTACTGGTTCTTCGATGTCTGGGGCCAAGGGACCACGGTCACCGTCTCCTCAGCCGCC
GCTCATCATCACCATCACCAT
SEQID NO. 286
ATGCCACCTCCTCGCCTCCTCTTCTTCCTCCTCTTCCTCACCCCCATGGAAGTCAGGCCCGAGGAACCTCTAGTGGTG
AAGGTGGAAGAGGGAGATAACGCTGTGCTGCAGTGCCTCAAGGGGACCTCAGATGGCCCCACTCAGCAGCTGACCTGG
TCTCGGGAGTCCCCGCTTAAACCCTTCTTAAAACTCAGCCTGGGGCTGCCAGGCCTGGGAATCCACATGAGGCCCCTG
GCCATCTGGCTTTTCATCTTCAACGTCTCTCAACAGATGGGGGGCTTCTACCTGTGCCAGCCGGGGCCCCCCTCTGAG
AAGGCCTGGCAGCCTGGCTGGACAGTCAATGTGGAGGGCAGCGGGGAGCTGTTCCGGTGGAATGTTTCGGACCTAGGT
GGCCTGGGCTGTGGCCTGAAGAACAGGTCCTCAGAGGGCCCCAGCTCCCCTTCCGGGAAGCTCATGAGCCCCAAGCTG
TATGTGTGGGCCAAAGACCGCCCTGAGATCTGGGAGGGAGAGCCTCCGTGTCTCCCACCGAGGGACAGCCTGAACCAG
AGCCTCAGCCAGGACCTCACCATGGCCCCTGGCTCCACACTCTGGCTGTCCTGTGGGGTACCCCCTGACTCTGTGTCC
AGGGGCCCCCTCTCCTGGACCCATGTGCACCCCAAGGGGCCTAAGTCATTGCTGAGCCTAGAGCTGAAGGACGATCGC
CCGGCCAGAGATATGTGGGTAATGGAGACGGGTCTGTTGTTGCCCCGGGCCACAGCTCAAGACGCTGGAAAGTATTAT
TGTCACCGTGGCAACCTGACCATGTCATTCCACCTGGAGATCACTGCTCGGCCAGGAGGAGGTGGGTCTGGAGGTGGA
GGATCTGGTGGAGGTGGGTCTGGAGGAGGTGGGTCTCAGGTGCAGCTGGTGCAGAGCGGCGCCGAGGACAAGAAGCCC
GGCGAGAGCGTGAAGATCAGCTGCAAGGCCAGCGGCTACACCTTCACCAACTACGGCATGAACTGGGTGAGGCAGGCC
CCCGGCCAGGGCCTGAAGTGGATGGGCTGGATCAACACCTACACCGGCGAGAGCACCTACGCCGACGACTTCAAGGGC
AGGTTCGCCTTCAGCCTGGACACCAGCGCCAGCACCGCCTACCTGCAGCTGAGCAGCCTGAGGGGCGAGGACACCGCC
GTGTACTTCTGCGCCAGGTTCGCCATCAAGGGCGACTACTGGGGCCAGGGCACCACCGTGACCGTGAGCAGCGCCAGC
ACCGGCGGCGGCGGCAGCGGCGGCGGCGGCAGCGGCGGCGGCGGCAGCGGCGGCGGCGGCAGCGACATCGTGATGACC
CAGAGCCCCCTGAGCCTGGAGGTGAGCCCCGGCGAGCCCGCCAGCATCAGCTGCAGGAGCACCAAGAGCCTGCTGCAC
AGCGACGGCATCACCTACCTGTACTGGTACCTGCAGAAGCCCGGCCAGAGCCCCCAGCTGCTGATCTACCAGCTGAGC
AACCTGGCCAGCGGCGTGCCCGACAGGTTCAGCAGCAGCGGCAGCGGCACCGACTTCACCCTGAAGATCAGCAGGGTG
GAGGCCGAGGACGAGGGCACCTACTACTGCGCCCAGAACCTGGAGATCCCCAGGACCTTCGGCCAGGGCACCAAGCTG
GAGATCAAGAGGACCCATCATCACCATCACCAT
SEQID NO. 287
ATGCCACCTCCTCGCCTCCTCTTCTTCCTCCTCTTCCTCACCCCCATGGAAGTCAGGCCCGAGGAACCTCTAGTGGTG
AAGGTGGAAGAGGGAGATAACGCTGTGCTGCAGTGCCTCAAGGGGACCTCAGATGGCCCCACTCAGCAGCTGACCTGG
TCTCGGGAGTCCCCGCTTAAACCCTTCTTAAAACTCAGCCTGGGGCTGCCAGGCCTGGGAATCCACATGAGGCCCCTG
GCCATCTGGCTTTTCATCTTCAACGTCTCTCAACAGATGGGGGGCTTCTACCTGTGCCAGCCGGGGCCCCCCTCTGAG
AAGGCCTGGCAGCCTGGCTGGACAGTCAATGTGGAGGGCAGCGGGGAGCTGTTCCGGTGGAATGTTTCGGACCTAGGT
GGCCTGGGCTGTGGCCTGAAGAACAGGTCCTCAGAGGGCCCCAGCTCCCCTTCCGGGAAGCTCATGAGCCCCAAGCTG
TATGTGTGGGCCAAAGACCGCCCTGAGATCTGGGAGGGAGAGCCTCCGTGTCTCCCACCGAGGGACAGCCTGAACCAG
AGCCTCAGCCAGGACCTCACCATGGCCCCTGGCTCCACACTCTGGCTGTCCTGTGGGGTACCCCCTGACTCTGTGTCC
AGGGGCCCCCTCTCCTGGACCCATGTGCACCCCAAGGGGCCTAAGTCATTGCTGAGCCTAGAGCTGAAGGACGATCGC
CCGGCCAGAGATATGTGGGTAATGGAGACGGGTCTGTTGTTGCCCCGGGCCACAGCTCAAGACGCTGGAAAGTATTAT
TGTCACCGTGGCAACCTGACCATGTCATTCCACCTGGAGATCACTGCTCGGCCAGGAGGAGGTGGGTCTGGAGGTGGA
GGATCTGGTGGAGGTGGGTCTGGAGGAGGTGGGTCTCAGGTTCAGCTGGTGCAGTCTGGTGCTGAGGATGTGAAGCCT
GATGCCTCAGTGAAGCTCTCCTGCAAGGCTTCTGGTTACACATTCACTGACTACTACATGCACTGGGTGCGTCAGGCC
CCTGGTCAAGGTCTTGAGTGGATGGGTCGTGTTAATCCTAACCGGAGGGGTACTACCTACAACCAGAAATTCGAGGGC
CGTGTCACCATGACCACAGACACATCCACGAGCACAGCCTACATGCAGCTGAGTAGCCTGCGTGGTGAAGACACGGCC
GTGTATTACTGTGCGCGTGCGAACTGGCTTGACTACTGGGGCCAGGGCACCACCGTCACCGTCTCCTCCGCCTCCACC
GGGGGAGGTGGGTCTGGAGGTGGAGGATCTGGTGGAGGTGGGTCTGGTGGAGGTGGGTCTGACATCCAGATGACCCAG
TCTCCATCCTCCCTGGAGGCATCTGTAGGAGACAGAGTCACCATCACTTGCAGTGTCAGCTCAAGTGTATCCTCCATT
TACTTGCACTGGTATCAGCAGAAACCAGGGAAAAGCCCTAAGCTCCTGATCTATAGCACATCCAACTTGGCTTCTGGA
GTCCCAGATAGGTTCAGTGGCAGTGGATCTGGGACAGATTTCACTCTCACCATCAGCAGTCTGCAAGCCGAAGATGAG
GGCACTTACTACTGTCAAGTCTACAGTGGTTACCCGCTCACGTTCGGCGGAGGGACCAAGCTGGAGATCAAACGAACT
CATCATCACCATCACCAT
SEQID NO. 288
ATGCCACCTCCTCGCCTCCTCTTCTTCCTCCTCTTCCTCACCCCCATGGAAGTCAGGCCCGAGGAACCTCTAGTGGTG
AAGGTGGAAGAGGGAGATAACGCTGTGCTGCAGTGCCTCAAGGGGACCTCAGATGGCCCCACTCAGCAGCTGACCTGG
TCTCGGGAGTCCCCGCTTAAACCCTTCTTAAAACTCAGCCTGGGGCTGCCAGGCCTGGGAATCCACATGAGGCCCCTG
GCCATCTGGCTTTTCATCTTCAACGTCTCTCAACAGATGGGGGGCTTCTACCTGTGCCAGCCGGGGCCCCCCTCTGAG
AAGGCCTGGCAGCCTGGCTGGACAGTCAATGTGGAGGGCAGCGGGGAGCTGTTCCGGTGGAATGTTTCGGACCTAGGT
GGCCTGGGCTGTGGCCTGAAGAACAGGTCCTCAGAGGGCCCCAGCTCCCCTTCCGGGAAGCTCATGAGCCCCAAGCTG
TATGTGTGGGCCAAAGACCGCCCTGAGATCTGGGAGGGAGAGCCTCCGTGTCTCCCACCGAGGGACAGCCTGAACCAG
AGCCTCAGCCAGGACCTCACCATGGCCCCTGGCTCCACACTCTGGCTGTCCTGTGGGGTACCCCCTGACTCTGTGTCC
AGGGGCCCCCTCTCCTGGACCCATGTGCACCCCAAGGGGCCTAAGTCATTGCTGAGCCTAGAGCTGAAGGACGATCGC
CCGGCCAGAGATATGTGGGTAATGGAGACGGGTCTGTTGTTGCCCCGGGCCACAGCTCAAGACGCTGGAAAGTATTAT
TGTCACCGTGGCAACCTGACCATGTCATTCCACCTGGAGATCACTGCTCGGCCAGGAGGAGGTGGGTCTGGAGGTGGA
GGATCTGGTGGAGGTGGGTCTGGAGGAGGTGGGTCTCAGGTGCAGCTGCAGGAGAGCGGCCCCGGCGACGTGAAGCCC
AGCGAGACCCTGAGCCTGACCTGCACCGTGAGCGGCGGCAGCGTGAGCAGCGGCGACTACTACTGGACCTGGATCAGG
CAGAGCCCCGGCAAGGGCCTGGAGTGGATCGGCCACATCTACTACAGCGGCAACACCAACTACAACCCCAGCCTGAAG
AGCAGGCTGACCATCAGCATCGACACCAGCAAGACCACCTTCAGCCTGCAGCTGAGCAGCGTGACCGGCGAGGACACC
GCCATCTACTACTGCGTGAGGGACAGGGTGACCGGCGCCTTCGACATCTGGGGCCAGGGCACCACCGTGACCGTGAGC
AGCGCCAGCACCGGCGGCGGCGGCAGCGGCGGCGGCGGCAGCGGCGGCGGCGGCAGCGGCGGCGGCGGCAGCGACATC
CAGATGACCCAGAGCCCCAGCAGCCTGGAGGCCAGCGTGGGCGACAGGGTGACCATCACCTGCCAGGCCAGCCAGGAC
ATCAGCAACTACCTGAACTGGTACCAGCAGAAGCCCGGCAAGAGCCCCAAGCTGCTGATCTACGACGCCAGCAACCTG
GAGACCGGCGTGCCCGACAGGTTCAGCGGCAGCGGCAGCGGCACCGACTTCACCTTCACCATCAGCAGCCTGCAGGCC
GAGGACGAGGGCACCTACTTCTGCCAGCACTTCGACCACCTGCCCCTGGCCTTCGGCGGCGGCACCAAGCTGGAGATC
AAGAGGACCCATCATCACCATCACCAT
SEQID NO. 289
ATGGAGACAGACACACTCCTGCTATGGGTACTGCTGCTCTGGGTTCCAGGTTCCACTGGTGACATCGTGCTGACCCAG
AGCCCCCCCAGCCTGGCCATGAGCCTGGGCAAGAGGGCCACCATCAGCTGCAGGGCCAGCGAGAGCGTGACCATCCTG
GGCAGCCACCTGATCCACTGGTACCAGCAGAAGCCCGGCCAGCCCCCCACCCTGCTGATCCAGCTGGCCAGCAACGTG
CAGACCGGCGTGCCCGCCAGGTTCAGCGGCAGCGGCAGCAGGACCGACTTCACCCTGACCATCGACCCCGTGGAGGAG
GACGACGTGGCCGTGTACTACTGCCTGCAGAGCAGGACCATCCCCAGGACCTTCGGCGGCGGCACCAAGCTGGAGATC
AAGGGCAGCACCAGCGGCAGCGGCAAGCCCGGCAGCGGCGAGGGCAGCACCAAGGGCCAGATCCAGCTGGTGCAGAGC
GGCCCCGAGCTGAAGAAGCCCGGCGAGACCGTGAAGATCAGCTGCAAGGCCAGCGGCTACACCTTCACCGACTACAGC
ATCAACTGGGTGAAGAGGGCCCCCGGCAAGGGCCTGAAGTGGATGGGCTGGATCAACACCGAGACCAGGGAGCCCGCC
TACGCCTACGACTTCAGGGGCAGGTTCGCCTTCAGCCTGGAGACCAGCGCCAGCACCGCCTACCTGCAGATCAACAAC
CTGAAGTACGAGGACACCGCCACCTACTTCTGCGCCCTGGACTACAGCTACGCCATGGACTACTGGGGCCAGGGCACC
AGCGTGACCGTGAGCAGCGGAGGAGGTGGGTCTGGAGGTGGAGGATCTGGTGGAGGTGGGTCTCATCATCACCATCAC
CAT
SEQID NO. 290
ATGGAGTTTGGGCTGAGCTGGGTTTTCCTCGTTGCTCTTTTTAGAGGTGTCCAGTGTCAGATCCAGCTGGTGCAGAGC
GGCCCCGAGCTGAAGAAGCCCGGCGAGACCGTGAAGATCAGCTGCAAGGCCAGCGGCTACACCTTCACCGACTACAGC
ATCAACTGGGTGAAGAGGGCCCCCGGCAAGGGCCTGAAGTGGATGGGCTGGATCAACACCGAGACCAGGGAGCCCGCC
TACGCCTACGACTTCAGGGGCAGGTTCGCCTTCAGCCTGGAGACCAGCGCCAGCACCGCCTACCTGCAGATCAACAAC
CTGAAGTACGAGGACACCGCCACCTACTTCTGCGCCCTGGACTACAGCTACGCCATGGACTACTGGGGCCAGGGCACC
AGCGTGACCGTGAGCAGCGGCAGCACCAGCGGCAGCGGCAAGCCCGGCAGCGGCGAGGGCAGCACCAAGGGC
GACATCGTGCTGACCCAGAGCCCCCCCAGCCTGGCCATGAGCCTGGGCAAGAGGGCCACCATCAGCTGCAGGGCCAGC
GAGAGCGTGACCATCCTGGGCAGCCACCTGATCCACTGGTACCAGCAGAAGCCCGGCCAGCCCCCCACCCTGCTGATC
CAGCTGGCCAGCAACGTGCAGACCGGCGTGCCCGCCAGGTTCAGCGGCAGCGGCAGCAGGACCGACTTCACCCTGACC
ATCGACCCCGTGGAGGAGGACGACGTGGCCGTGTACTACTGCCTGCAGAGCAGGACCATCCCCAGGACCTTCGGCGGC
GGCACCAAGCTGGAGATCAAGGGAGGAGGTGGGTCTGGAGGTGGAGGATCTGGTGGAGGTGGGTCTCATCATCACCAT
CACCAT
SEQID NO. 291
ATGCCACCTCCTCGCCTCCTCTTCTTCCTCCTCTTCCTCACCCCCATGGAAGTCAGGCCCGAGGAACCTCTAGTGGTG
AAGGTGGAAGAGGGAGATAACGCTGTGCTGCAGTGCCTCAAGGGGACCTCAGATGGCCCCACTCAGCAGCTGACCTGG
TCTCGGGAGTCCCCGCTTAAACCCTTCTTAAAACTCAGCCTGGGGCTGCCAGGCCTGGGAATCCACATGAGGCCCCTG
GCCATCTGGCTTTTCATCTTCAACGTCTCTCAACAGATGGGGGGCTTCTACCTGTGCCAGCCGGGGCCCCCCTCTGAG
AAGGCCTGGCAGCCTGGCTGGACAGTCAATGTGGAGGGCAGCGGGGAGCTGTTCCGGTGGAATGTTTCGGACCTAGGT
GGCCTGGGCTGTGGCCTGAAGAACAGGTCCTCAGAGGGCCCCAGCTCCCCTTCCGGGAAGCTCATGAGCCCCAAGCTG
TATGTGTGGGCCAAAGACCGCCCTGAGATCTGGGAGGGAGAGCCTCCGTGTCTCCCACCGAGGGACAGCCTGAACCAG
AGCCTCAGCCAGGACCTCACCATGGCCCCTGGCTCCACACTCTGGCTGTCCTGTGGGGTACCCCCTGACTCTGTGTCC
AGGGGCCCCCTCTCCTGGACCCATGTGCACCCCAAGGGGCCTAAGTCATTGCTGAGCCTAGAGCTGAAGGACGATCGC
CCGGCCAGAGATATGTGGGTAATGGAGACGGGTCTGTTGTTGCCCCGGGCCACAGCTCAAGACGCTGGAAAGTATTAT
TGTCACCGTGGCAACCTGACCATGTCATTCCACCTGGAGATCACTGCTCGGCCAGGAGGAGGTGGGTCTGGAGGTGGA
GGATCTGGTGGAGGTGGGTCTGGAGGAGGTGGGTCTGACATCGTGCTGACCCAGAGCCCCCCCAGCCTGGCCATGAGC
CTGGGCAAGAGGGCCACCATCAGCTGCAGGGCCAGCGAGAGCGTGACCATCCTGGGCAGCCACCTGATCCACTGGTAC
CAGCAGAAGCCCGGCCAGCCCCCCACCCTGCTGATCCAGCTGGCCAGCAACGTGCAGACCGGCGTGCCCGCCAGGTTC
AGCGGCAGCGGCAGCAGGACCGACTTCACCCTGACCATCGACCCCGTGGAGGAGGACGACGTGGCCGTGTACTACTGC
CTGCAGAGCAGGACCATCCCCAGGACCTTCGGCGGCGGCACCAAGCTGGAGATCAAGGGCAGCACCAGCGGCAGCGGC
AAGCCCGGCAGCGGCGAGGGCAGCACCAAGGGCCAGATCCAGCTGGTGCAGAGCGGCCCCGAGCTGAAGAAGCCCGGC
GAGACCGTGAAGATCAGCTGCAAGGCCAGCGGCTACACCTTCACCGACTACAGCATCAACTGGGTGAAGAGGGCCCCC
GGCAAGGGCCTGAAGTGGATGGGCTGGATCAACACCGAGACCAGGGAGCCCGCCTACGCCTACGACTTCAGGGGCAGG
TTCGCCTTCAGCCTGGAGACCAGCGCCAGCACCGCCTACCTGCAGATCAACAACCTGAAGTACGAGGACACCGCCACC
TACTTCTGCGCCCTGGACTACAGCTACGCCATGGACTACTGGGGCCAGGGCACCAGCGTGACCGTGAGCAGCGGAGGA
GGTGGGTCTGGAGGTGGAGGATCTGGTGGAGGTGGGTCTCATCATCACCATCACCAT
SEQID NO. 292
ATGCCACCTCCTCGCCTCCTCTTCTTCCTCCTCTTCCTCACCCCCATGGAAGTCAGGCCCGAGGAACCTCTAGTGGTG
AAGGTGGAAGAGGGAGATAACGCTGTGCTGCAGTGCCTCAAGGGGACCTCAGATGGCCCCACTCAGCAGCTGACCTGG
TCTCGGGAGTCCCCGCTTAAACCCTTCTTAAAACTCAGCCTGGGGCTGCCAGGCCTGGGAATCCACATGAGGCCCCTG
GCCATCTGGCTTTTCATCTTCAACGTCTCTCAACAGATGGGGGGCTTCTACCTGTGCCAGCCGGGGCCCCCCTCTGAG
AAGGCCTGGCAGCCTGGCTGGACAGTCAATGTGGAGGGCAGCGGGGAGCTGTTCCGGTGGAATGTTTCGGACCTAGGT
GGCCTGGGCTGTGGCCTGAAGAACAGGTCCTCAGAGGGCCCCAGCTCCCCTTCCGGGAAGCTCATGAGCCCCAAGCTG
TATGTGTGGGCCAAAGACCGCCCTGAGATCTGGGAGGGAGAGCCTCCGTGTCTCCCACCGAGGGACAGCCTGAACCAG
AGCCTCAGCCAGGACCTCACCATGGCCCCTGGCTCCACACTCTGGCTGTCCTGTGGGGTACCCCCTGACTCTGTGTCC
AGGGGCCCCCTCTCCTGGACCCATGTGCACCCCAAGGGGCCTAAGTCATTGCTGAGCCTAGAGCTGAAGGACGATCGC
CCGGCCAGAGATATGTGGGTAATGGAGACGGGTCTGTTGTTGCCCCGGGCCACAGCTCAAGACGCTGGAAAGTATTAT
TGTCACCGTGGCAACCTGACCATGTCATTCCACCTGGAGATCACTGCTCGGCCAGGAGGAGGTGGGTCTGGAGGTGGA
GGATCTGGTGGAGGTGGGTCTGGAGGAGGTGGGTCTCAGATCCAGCTGGTGCAGAGCGGCCCCGAGCTGAAGAAGCCC
GGCGAGACCGTGAAGATCAGCTGCAAGGCCAGCGGCTACACCTTCACCGACTACAGCATCAACTGGGTGAAGAGGGCC
CCCGGCAAGGGCCTGAAGTGGATGGGCTGGATCAACACCGAGACCAGGGAGCCCGCCTACGCCTACGACTTCAGGGGC
AGGTTCGCCTTCAGCCTGGAGACCAGCGCCAGCACCGCCTACCTGCAGATCAACAACCTGAAGTACGAGGACACCGCC
ACCTACTTCTGCGCCCTGGACTACAGCTACGCCATGGACTACTGGGGCCAGGGCACCAGCGTGACCGTGAGCAGCGGC
AGCACCAGCGGCAGCGGCAAGCCCGGCAGCGGCGAGGGCAGCACCAAGGGCGACATCGTGCTGACCCAGAGCCCCCCC
AGCCTGGCCATGAGCCTGGGCAAGAGGGCCACCATCAGCTGCAGGGCCAGCGAGAGCGTGACCATCCTGGGCAGCCAC
CTGATCCACTGGTACCAGCAGAAGCCCGGCCAGCCCCCCACCCTGCTGATCCAGCTGGCCAGCAACGTGCAGACCGGC
GTGCCCGCCAGGTTCAGCGGCAGCGGCAGCAGGACCGACTTCACCCTGACCATCGACCCCGTGGAGGAGGACGACGTG
GCCGTGTACTACTGCCTGCAGAGCAGGACCATCCCCAGGACCTTCGGCGGCGGCACCAAGCTGGAGATCAAGGGAGGA
GGTGGGTCTGGAGGTGGAGGATCTGGTGGAGGTGGGTCTCATCATCACCATCACCAT
SEQID NO. 293
ATGCCACCTCCTCGCCTCCTCTTCTTCCTCCTCTTCCTCACCCCCATGGAAGTCAGGCCCGAGGAACCTCTAGTGGTG
AAGGTGGAAGAGGGAGATAACGCTGTGCTGCAGTGCCTCAAGGGGACCTCAGATGGCCCCACTCAGCAGCTGACCTGG
TCTCGGGAGTCCCCGCTTAAACCCTTCTTAAAACTCAGCCTGGGGCTGCCAGGCCTGGGAATCCACATGAGGCCCCTG
GCCATCTGGCTTTTCATCTTCAACGTCTCTCAACAGATGGGGGGCTTCTACCTGTGCCAGCCGGGGCCCCCCTCTGAG
AAGGCCTGGCAGCCTGGCTGGACAGTCAATGTGGAGGGCAGCGGGGAGCTGTTCCGGTGGAATGTTTCGGACCTAGGT
GGCCTGGGCTGTGGCCTGAAGAACAGGTCCTCAGAGGGCCCCAGCTCCCCTTCCGGGAAGCTCATGAGCCCCAAGCTG
TATGTGTGGGCCAAAGACCGCCCTGAGATCTGGGAGGGAGAGCCTCCGTGTCTCCCACCGAGGGACAGCCTGAACCAG
AGCCTCAGCCAGGACCTCACCATGGCCCCTGGCTCCACACTCTGGCTGTCCTGTGGGGTACCCCCTGACTCTGTGTCC
AGGGGCCCCCTCTCCTGGACCCATGTGCACCCCAAGGGGCCTAAGTCATTGCTGAGCCTAGAGCTGAAGGACGATCGC
CCGGCCAGAGATATGTGGGTAATGGAGACGGGTCTGTTGTTGCCCCGGGCCACAGCTCAAGACGCTGGAAAGTATTAT
TGTCACCGTGGCAACCTGACCATGTCATTCCACCTGGAGATCACTGCTCGGCCAGACAAAACTCACACATGCCCACCG
TGCCCAGCACCTGAACTCCTGGGGGGACCGTCAGTCTTCCTCTTCCCCCCAAAACCCAAGGACACCCTCATGATCTCC
CGGACCCCTGAGGTCACATGCGTGGTGGTGGACGTGAGCCACGAAGACCCTGAGGTCAAGTTCAACTGGTACGTGGAC
GGCGTGGAGGTGCATAATGCCAAGACAAAGCCGCGGGAGGAGCAGTACAACAGCACGTACCGTGTGGTCAGCGTCCTC
ACCGTCCTGCACCAGGACTGGCTGAATGGCAAGGAGTACAAGTGCAAGGTCTCCAACAAAGCCCTCCCAGCCCCCATC
GAGAAAACCATCTCCAAAGCCAAAGGGCAGCCCCGAGAACCACAGGTGTACACCCTGCCCCCATCCCGGGAGGAGATG
ACCAAGAACCAGGTCAGCCTGACCTGCCTGGTCAAAGGCTTCTATCCCAGCGACATCGCCGTGGAGTGGGAGAGCAAT
GGGCAGCCGGAGAACAACTACAAGACCACGCCTCCCGTGCTGGACTCCGACGGCTCCTTCTTCCTCTACAGCAAGCTC
ACCGTGGACAAGAGCAGGTGGCAGCAGGGGAACGTCTTCTCATGCTCCGTGATGCACGAGGCTCTGCACAACCACTAC
ACGCAGAAGAGCCTCTCCCTGTCTCCGGGTGGAGGAGGTGGGTCTGGAGGTGGAGGATCTGGTGGAGGTGGGTCTGGA
GGAGGTGGGTCTGAGGTGCAGCTGGTGGAGTCTGGTGGTGGTCTTGTTCAACCTGGTGGTTCTCTTCGTCTTTCTTGT
GCTGCTTCTGGTTTTAATATTAAAGATACTTATATTCATTGGGTTCGTCAAGCTCCTGGTAAAGGTCTTGAATGGGTT
GCTCGTATTTATCCTACTAATGGTTATACTCGTTATGCTGATTCTGTTAAAGGTCGTTTTACTATTTCTGCTGATACT
TCTAAAAATACTGCTTATCTTCAAATGAACTCTCTTCGTGCTGAAGATACTGCTGTTTATTATTGTTCTCGTTGGGGT
GGTGATGGTTTTTATGCTATGGATTATTGGGGTCAAGGTACTCTTGTCACCGTCTCCTCAGCTAGCACCGGGGGAGGT
GGGTCTGGAGGTGGAGGATCTGGTGGAGGTGGGTCTGACATCCAGATGACCCAGTCTCCTTCTTCTCTTTCTGCTTCT
GTTGGTGATCGTGTTACTATTACTTGTCGTGCTTCTCAAGATGTTAATACTGCTGTTGCTTGGTATCAACAAAAACCT
GGTAAAGCTCCTAAACTTCTTATTTATTCTGCTTCTTTTCTTTATTCTGGTGTTCCTTCTCGTTTTTCTGGTTCTCGT
TCTGGTACTGATTTTACTCTTACTATTTCTTCTCTTCAACCTGAAGATTTTGCTACTTATTATTGTCAACAACATTAT
ACTACTCCTCCTACTTTTGGTCAAGGTACCAAGGTGGAGATCAAACGTACG
SEQID NO. 294
ATGCCACCTCCTCGCCTCCTCTTCTTCCTCCTCTTCCTCACCCCCATGGAAGTCAGGCCCGAGGAACCTCTAGTGGTG
AAGGTGGAAGAGGGAGATAACGCTGTGCTGCAGTGCCTCAAGGGGACCTCAGATGGCCCCACTCAGCAGCTGACCTGG
TCTCGGGAGTCCCCGCTTAAACCCTTCTTAAAACTCAGCCTGGGGCTGCCAGGCCTGGGAATCCACATGAGGCCCCTG
GCCATCTGGCTTTTCATCTTCAACGTCTCTCAACAGATGGGGGGCTTCTACCTGTGCCAGCCGGGGCCCCCCTCTGAG
AAGGCCTGGCAGCCTGGCTGGACAGTCAATGTGGAGGGCAGCGGGGAGCTGTTCCGGTGGAATGTTTCGGACCTAGGT
GGCCTGGGCTGTGGCCTGAAGAACAGGTCCTCAGAGGGCCCCAGCTCCCCTTCCGGGAAGCTCATGAGCCCCAAGCTG
TATGTGTGGGCCAAAGACCGCCCTGAGATCTGGGAGGGAGAGCCTCCGTGTCTCCCACCGAGGGACAGCCTGAACCAG
AGCCTCAGCCAGGACCTCACCATGGCCCCTGGCTCCACACTCTGGCTGTCCTGTGGGGTACCCCCTGACTCTGTGTCC
AGGGGCCCCCTCTCCTGGACCCATGTGCACCCCAAGGGGCCTAAGTCATTGCTGAGCCTAGAGCTGAAGGACGATCGC
CCGGCCAGAGATATGTGGGTAATGGAGACGGGTCTGTTGTTGCCCCGGGCCACAGCTCAAGACGCTGGAAAGTATTAT
TGTCACCGTGGCAACCTGACCATGTCATTCCACCTGGAGATCACTGCTCGGCCAGGGGGAGGTGGGTCTGGAGGTGGA
GGATCTGGTGGAGGTGGGTCTGGTGGAGGTGGGTCTGAGGTGCAGCTGGTGGAGTCTGGTGGTGGTCTTGTTCAACCT
GGTGGTTCTCTTCGTCTTTCTTGTGCTGCTTCTGGTTTTAATATTAAAGATACTTATATTCATTGGGTTCGTCAAGCT
CCTGGTAAAGGTCTTGAATGGGTTGCTCGTATTTATCCTACTAATGGTTATACTCGTTATGCTGATTCTGTTAAAGGT
CGTTTTACTATTTCTGCTGATACTTCTAAAAATACTGCTTATCTTCAAATGAACTCTCTTCGTGCTGAAGATACTGCT
GTTTATTATTGTTCTCGTTGGGGTGGTGATGGTTTTTATGCTATGGATTATTGGGGTCAAGGTACTCTTGTCACCGTC
TCCTCAGCTAGCACCGGGGGAGGTGGGTCTGGAGGTGGAGGATCTGGTGGAGGTGGGTCTGACATCCAGATGACCCAG
TCTCCTTCTTCTCTTTCTGCTTCTGTTGGTGATCGTGTTACTATTACTTGTCGTGCTTCTCAAGATGTTAATACTGCT
GTTGCTTGGTATCAACAAAAACCTGGTAAAGCTCCTAAACTTCTTATTTATTCTGCTTCTTTTCTTTATTCTGGTGTT
CCTTCTCGTTTTTCTGGTTCTCGTTCTGGTACTGATTTTACTCTTACTATTTCTTCTCTTCAACCTGAAGATTTTGCT
ACTTATTATTGTCAACAACATTATACTACTCCTCCTACTTTTGGTCAAGGTACCAAGGTGGAGATCAAACGTACGGGA
GGAGGTGGGTCTGGAGGTGGAGGATCTGGTGGAGGTGGGTCTGGAGGAGGTGGGTCTCAGGTGCAGCTGCAGGAGAGC
GGCCCCGGCGACGTGAAGCCCAGCGAGACCCTGAGCCTGACCTGCACCGTGAGCGGCGGCAGCGTGAGCAGCGGCGAC
TACTACTGGACCTGGATCAGGCAGAGCCCCGGCAAGGGCCTGGAGTGGATCGGCCACATCTACTACAGCGGCAACACC
AACTACAACCCCAGCCTGAAGAGCAGGCTGACCATCAGCATCGACACCAGCAAGACCACCTTCAGCCTGCAGCTGAGC
AGCGTGACCGGCGAGGACACCGCCATCTACTACTGCGTGAGGGACAGGGTGACCGGCGCCTTCGACATCTGGGGCCAG
GGCACCACCGTGACCGTGAGCAGCGCCAGCACCGGCGGAGGTGGCAGCGGCGGAGGTGGCAGCGGCGGAGGTGGCAGC
GGCGGAGGTGGCAGCGACATCCAGATGACCCAGAGCCCCAGCAGCCTGGAGGCCAGCGTGGGCGACAGGGTGACCATC
ACCTGCCAGGCCAGCCAGGACATCAGCAACTACCTGAACTGGTACCAGCAGAAGCCCGGCAAGAGCCCCAAGCTGCTG
ATCTACGACGCCAGCAACCTGGAGACCGGCGTGCCCGACAGGTTCAGCGGCAGCGGCAGCGGCACCGACTTCACCTTC
ACCATCAGCAGCCTGCAGGCCGAGGACGAGGGCACCTACTTCTGCCAGCACTTCGACCACCTGCCCCTGGCCTTCGGC
GGCGGCACCAAGCTGGAGATCAAGAGGACCGGAGGAGGTGGGTCTCATCATCACCATCACCAT
SEQID NO. 295
ATGCCACCTCCTCGCCTCCTCTTCTTCCTCCTCTTCCTCACCCCCATGGAAGTCAGGCCCGAGGAACCTCTAGTGGTG
AAGGTGGAAGAGGGAGATAACGCTGTGCTGCAGTGCCTCAAGGGGACCTCAGATGGCCCCACTCAGCAGCTGACCTGG
TCTCGGGAGTCCCCGCTTAAACCCTTCTTAAAACTCAGCCTGGGGCTGCCAGGCCTGGGAATCCACATGAGGCCCCTG
GCCATCTGGCTTTTCATCTTCAACGTCTCTCAACAGATGGGGGGCTTCTACCTGTGCCAGCCGGGGCCCCCCTCTGAG
AAGGCCTGGCAGCCTGGCTGGACAGTCAATGTGGAGGGCAGCGGGGAGCTGTTCCGGTGGAATGTTTCGGACCTAGGT
GGCCTGGGCTGTGGCCTGAAGAACAGGTCCTCAGAGGGCCCCAGCTCCCCTTCCGGGAAGCTCATGAGCCCCAAGCTG
TATGTGTGGGCCAAAGACCGCCCTGAGATCTGGGAGGGAGAGCCTCCGTGTCTCCCACCGAGGGACAGCCTGAACCAG
AGCCTCAGCCAGGACCTCACCATGGCCCCTGGCTCCACACTCTGGCTGTCCTGTGGGGTACCCCCTGACTCTGTGTCC
AGGGGCCCCCTCTCCTGGACCCATGTGCACCCCAAGGGGCCTAAGTCATTGCTGAGCCTAGAGCTGAAGGACGATCGC
CCGGCCAGAGATATGTGGGTAATGGAGACGGGTCTGTTGTTGCCCCGGGCCACAGCTCAAGACGCTGGAAAGTATTAT
TGTCACCGTGGCAACCTGACCATGTCATTCCACCTGGAGATCACTGCTCGGCCAGGGGGAGGTGGGTCTGGAGGTGGA
GGATCTGGTGGAGGTGGGTCTGGTGGAGGTGGGTCTGAGGTGCAGCTGGTGGAGTCTGGTGGTGGTCTTGTTCAACCT
GGTGGTTCTCTTCGTCTTTCTTGTGCTGCTTCTGGTTTTAATATTAAAGATACTTATATTCATTGGGTTCGTCAAGCT
CCTGGTAAAGGTCTTGAATGGGTTGCTCGTATTTATCCTACTAATGGTTATACTCGTTATGCTGATTCTGTTAAAGGT
CGTTTTACTATTTCTGCTGATACTTCTAAAAATACTGCTTATCTTCAAATGAACTCTCTTCGTGCTGAAGATACTGCT
GTTTATTATTGTTCTCGTTGGGGTGGTGATGGTTTTTATGCTATGGATTATTGGGGTCAAGGTACTCTTGTCACCGTC
TCCTCAGCTAGCACCGGGGGAGGTGGGTCTGGAGGTGGAGGATCTGGTGGAGGTGGGTCTGACATCCAGATGACCCAG
TCTCCTTCTTCTCTTTCTGCTTCTGTTGGTGATCGTGTTACTATTACTTGTCGTGCTTCTCAAGATGTTAATACTGCT
GTTGCTTGGTATCAACAAAAACCTGGTAAAGCTCCTAAACTTCTTATTTATTCTGCTTCTTTTCTTTATTCTGGTGTT
CCTTCTCGTTTTTCTGGTTCTCGTTCTGGTACTGATTTTACTCTTACTATTTCTTCTCTTCAACCTGAAGATTTTGCT
ACTTATTATTGTCAACAACATTATACTACTCCTCCTACTTTTGGTCAAGGTACCAAGGTGGAGATCAAACGTACGGGA
GGAGGTGGGTCTGGAGGTGGAGGATCTGGTGGAGGTGGGTCTGGAGGAGGTGGGTCTGACATCCAGATGACCCAGAGC
CCCAGCAGCCTGGAGGCCAGCGTGGGCGACAGGGTGACCATCACCTGCCAGGCCAGCCAGGACATCAGCAACTACCTG
AACTGGTACCAGCAGAAGCCCGGCAAGAGCCCCAAGCTGCTGATCTACGACGCCAGCAACCTGGAGACCGGCGTGCCC
GACAGGTTCAGCGGCAGCGGCAGCGGCACCGACTTCACCTTCACCATCAGCAGCCTGCAGGCCGAGGACGAGGGCACC
TACTTCTGCCAGCACTTCGACCACCTGCCCCTGGCCTTCGGCGGCGGCACCAAGCTGGAGATCAAGAGGACCGGCGGA
GGTGGCAGCGGCGGAGGTGGCAGCGGCGGAGGTGGCAGCGGCGGAGGTGGCAGCCAGGTGCAGCTGCAGGAGAGCGGC
CCCGGCGACGTGAAGCCCAGCGAGACCCTGAGCCTGACCTGCACCGTGAGCGGCGGCAGCGTGAGCAGCGGCGACTAC
TACTGGACCTGGATCAGGCAGAGCCCCGGCAAGGGCCTGGAGTGGATCGGCCACATCTACTACAGCGGCAACACCAAC
TACAACCCCAGCCTGAAGAGCAGGCTGACCATCAGCATCGACACCAGCAAGACCACCTTCAGCCTGCAGCTGAGCAGC
GTGACCGGCGAGGACACCGCCATCTACTACTGCGTGAGGGACAGGGTGACCGGCGCCTTCGACATCTGGGGCCAGGGC
ACCACCGTGACCGTGAGCAGCGCCAGCACCGGAGGAGGTGGGTCTCATCATCACCATCACCAT
SEQID NO. 296
ATGGAGTTTGGGCTGAGCTGGGTTTTCCTCGTTGCTCTTTTTAGAGGTGTCCAGTGTGAGGTGCAGCTGGTGGAGTCT
GGTGGTGGTCTTGTTCAACCTGGTGGTTCTCTTCGTCTTTCTTGTGCTGCTTCTGGTTTTAATATTAAAGATACTTAT
ATTCATTGGGTTCGTCAAGCTCCTGGTAAAGGTCTTGAATGGGTTGCTCGTATTTATCCTACTAATGGTTATACTCGT
TATGCTGATTCTGTTAAAGGTCGTTTTACTATTTCTGCTGATACTTCTAAAAATACTGCTTATCTTCAAATGAACTCT
CTTCGTGCTGAAGATACTGCTGTTTATTATTGTTCTCGTTGGGGTGGTGATGGTTTTTATGCTATGGATTATTGGGGT
CAAGGTACTCTTGTCACCGTCTCCTCAGCTAGCACCGGGGGAGGTGGGTCTGGAGGTGGAGGATCTGGTGGAGGTGGG
TCTGACATCCAGATGACCCAGTCTCCTTCTTCTCTTTCTGCTTCTGTTGGTGATCGTGTTACTATTACTTGTCGTGCT
TCTCAAGATGTTAATACTGCTGTTGCTTGGTATCAACAAAAACCTGGTAAAGCTCCTAAACTTCTTATTTATTCTGCT
TCTTTTCTTTATTCTGGTGTTCCTTCTCGTTTTTCTGGTTCTCGTTCTGGTACTGATTTTACTCTTACTATTTCTTCT
CTTCAACCTGAAGATTTTGCTACTTATTATTGTCAACAACATTATACTACTCCTCCTACTTTTGGTCAAGGTACCAAG
GTGGAGATCAAACGTACGGGAGGAGGTGGGTCTGGAGGTGGAGGATCTGGTGGAGGTGGGTCTGGAGGAGGTGGGTCT
CAGGTGCAGCTGCAGGAGAGCGGCCCCGGCGACGTGAAGCCCAGCGAGACCCTGAGCCTGACCTGCACCGTGAGCGGC
GGCAGCGTGAGCAGCGGCGACTACTACTGGACCTGGATCAGGCAGAGCCCCGGCAAGGGCCTGGAGTGGATCGGCCAC
ATCTACTACAGCGGCAACACCAACTACAACCCCAGCCTGAAGAGCAGGCTGACCATCAGCATCGACACCAGCAAGACC
ACCTTCAGCCTGCAGCTGAGCAGCGTGACCGGCGAGGACACCGCCATCTACTACTGCGTGAGGGACAGGGTGACCGGC
GCCTTCGACATCTGGGGCCAGGGCACCACCGTGACCGTGAGCAGCGCCAGCACCGGCGGAGGTGGCAGCGGCGGAGGT
GGCAGCGGCGGAGGTGGCAGCGGCGGAGGTGGCAGCGACATCCAGATGACCCAGAGCCCCAGCAGCCTGGAGGCCAGC
GTGGGCGACAGGGTGACCATCACCTGCCAGGCCAGCCAGGACATCAGCAACTACCTGAACTGGTACCAGCAGAAGCCC
GGCAAGAGCCCCAAGCTGCTGATCTACGACGCCAGCAACCTGGAGACCGGCGTGCCCGACAGGTTCAGCGGCAGCGGC
AGCGGCACCGACTTCACCTTCACCATCAGCAGCCTGCAGGCCGAGGACGAGGGCACCTACTTCTGCCAGCACTTCGAC
CACCTGCCCCTGGCCTTCGGCGGCGGCACCAAGCTGGAGATCAAGAGGACCGGAGGAGGTGGGTCTCATCATCACCAT
CACCAT
SEQID NO. 297
ATGGAGTTTGGGCTGAGCTGGGTTTTCCTCGTTGCTCTTTTTAGAGGTGTCCAGTGTGAGGTGCAGCTGGTGGAGTCT
GGTGGTGGTCTTGTTCAACCTGGTGGTTCTCTTCGTCTTTCTTGTGCTGCTTCTGGTTTTAATATTAAAGATACTTAT
ATTCATTGGGTTCGTCAAGCTCCTGGTAAAGGTCTTGAATGGGTTGCTCGTATTTATCCTACTAATGGTTATACTCGT
TATGCTGATTCTGTTAAAGGTCGTTTTACTATTTCTGCTGATACTTCTAAAAATACTGCTTATCTTCAAATGAACTCT
CTTCGTGCTGAAGATACTGCTGTTTATTATTGTTCTCGTTGGGGTGGTGATGGTTTTTATGCTATGGATTATTGGGGT
CAAGGTACTCTTGTCACCGTCTCCTCAGCTAGCACCGGGGGAGGTGGGTCTGGAGGTGGAGGATCTGGTGGAGGTGGG
TCTGACATCCAGATGACCCAGTCTCCTTCTTCTCTTTCTGCTTCTGTTGGTGATCGTGTTACTATTACTTGTCGTGCT
TCTCAAGATGTTAATACTGCTGTTGCTTGGTATCAACAAAAACCTGGTAAAGCTCCTAAACTTCTTATTTATTCTGCT
TCTTTTCTTTATTCTGGTGTTCCTTCTCGTTTTTCTGGTTCTCGTTCTGGTACTGATTTTACTCTTACTATTTCTTCT
CTTCAACCTGAAGATTTTGCTACTTATTATTGTCAACAACATTATACTACTCCTCCTACTTTTGGTCAAGGTACCAAG
GTGGAGATCAAACGTACGGGAGGAGGTGGGTCTGGAGGTGGAGGATCTGGTGGAGGTGGGTCTGGAGGAGGTGGGTCT
GACATCCAGATGACCCAGAGCCCCAGCAGCCTGGAGGCCAGCGTGGGCGACAGGGTGACCATCACCTGCCAGGCCAGC
CAGGACATCAGCAACTACCTGAACTGGTACCAGCAGAAGCCCGGCAAGAGCCCCAAGCTGCTGATCTACGACGCCAGC
AACCTGGAGACCGGCGTGCCCGACAGGTTCAGCGGCAGCGGCAGCGGCACCGACTTCACCTTCACCATCAGCAGCCTG
CAGGCCGAGGACGAGGGCACCTACTTCTGCCAGCACTTCGACCACCTGCCCCTGGCCTTCGGCGGCGGCACCAAGCTG
GAGATCAAGAGGACCGGCGGAGGTGGCAGCGGCGGAGGTGGCAGCGGCGGAGGTGGCAGCGGCGGAGGTGGCAGCCAG
GTGCAGCTGCAGGAGAGCGGCCCCGGCGACGTGAAGCCCAGCGAGACCCTGAGCCTGACCTGCACCGTGAGCGGCGGC
AGCGTGAGCAGCGGCGACTACTACTGGACCTGGATCAGGCAGAGCCCCGGCAAGGGCCTGGAGTGGATCGGCCACATC
TACTACAGCGGCAACACCAACTACAACCCCAGCCTGAAGAGCAGGCTGACCATCAGCATCGACACCAGCAAGACCACC
TTCAGCCTGCAGCTGAGCAGCGTGACCGGCGAGGACACCGCCATCTACTACTGCGTGAGGGACAGGGTGACCGGCGCC
TTCGACATCTGGGGCCAGGGCACCACCGTGACCGTGAGCAGCGCCAGCACCGGAGGAGGTGGGTCTCATCATCACCAT
CACCAT
SEQID NO. 298
GATATCGAATTAGGAGGAAAACTGTTTCATACAGAAGGCGTCAATTAGGAGGAAAAACTGTTTCATACAGAAGGCGTC
AATTAGGAGGAAAAACTGTTTCATACAGAAGGCGTCAATTGGTCCCATCGAATTAGGAGGAAAAACTGTTTCATACAG
AAGGCGTCAATTAGGAGGAAAAACTGTTTCATACAGAAGGCGTCAATTAGGAGGAAAAACTGTTTCATACAGAAGGCG
TCAATTGGTCCCGGGACATTTTGACACCCCCATAATATTTTTCCAGAATTAACAGTATAAATTGCATCTCTTGTTCAA
GAGTTCCCTATCACTCTCTTTAATCACTACTCACAGTAACCTCAACTCCTGGCGGCCGCGCCACCATGCCACCTCCTC
GCCTCCTCTTCTTCCTCCTCTTCCTCACCCCCATGGAAGTCAGGCCCGAGGAACCTCTAGTGGTGAAGGTGGAAGAGG
GAGATAACGCTGTGCTGCAGTGCCTCAAGGGGACCTCAGATGGCCCCACTCAGCAGCTGACTTGGTCTCGGGAGTCCC
CGCTTAAACCCTTCTTAAAACTCAGCCTGGGGCTGCCAGGCCTGGGAATCCACATGAGGCCCCTGGCCATCTGGCTTT
TCATCTTCAACGTCTCTCAACAGATGGGGGGCTTCTACCTGTGCCAGCCGGGGCCCCCCTCTGAGAAGGCCTGGCAGC
CTGGCTGGACAGTCAATGTGGAGGGCAGCGGGGAGCTGTTCCGGTGGAATGTTTCGGACCTAGGTGGCCTGGGCTGTG
GCCTGAAGAACAGGTCCTCAGAGGGCCCCAGCTCCCCTTCCGGGAAGCTCATGAGCCCCAAGCTGTATGTGTGGGCCA
AAGACCGCCCTGAGATCTGGGAGGGAGAGCCTCCGTGTCTCCCACCGAGGGACAGCCTGAACCAGAGCCTCAGCCAGG
ACCTCACCATGGCCCCTGGCTCCACACTCTGGCTGTCCTGTGGGGTACCCCCTGACTCTGTGTCCAGGGGCCCCCTCT
CCTGGACCCATGTGCACCCCAAGGGGCCTAAGTCATTGCTGAGCCTAGAGCTGAAGGACGATCGCCCGGCCAGAGATA
TGTGGGTAATGGAGACGGGTCTGTTGTTGCCCCGGGCCACAGCTCAAGACGCTGGAAAGTATTATTGTCACCGTGGCA
ACCTGACCATGTCATTCCACCTGGAGATCACTGCTCGGCCAGGGGGAGGTGGGTCTGGAGGTGGAGGATCTGGTGGAG
GTGGGTCTGGTGGAGGTGGGTCTGAGGTGCAGCTGGTGGAGTCTGGTGGTGGTCTTGTTCAACCCGGTGGTTCTCTTC
GTCTTTCTTGTGCTGCTTCTGGTTTTAATATTAAAGATACTTATATTCATTGGGTTCGTCAAGCTCCTGGTAAAGGTC
TTGAATGGGTTGCTCGTATTTATCCTACTAATGGTTATACTCGTTATGCTGATTCTGTTAAAGGTCGTTTTACTATTT
CTGCTGATACTTCTAAAAATACTGCTTATCTTCAAATGAACTCTCTTCGTGCTGAAGATACTGCTGTTTATTATTGTT
CTCGTTGGGGTGGTGATGGTTTTTATGCTATGGATTATTGGGGTCAAGGTACTCTTGTCACCGTCTCCTCAGCTAGCA
CCGGGGGAGGTGGGTCTGGAGGTGGAGGATCTGGTGGAGGTGGGTCTGACATCCAGATGACCCAGTCTCCTTCTTCTC
TTTCTGCTTCTGTTGGTGATCGTGTTACTATTACTTGTCGTGCTTCTCAAGATGTTAATACTGCTGTTGCTTGGTATC
AACAAAAACCCGGTAAAGCTCCTAAACTTCTTATTTATTCTGCTTCTTTTCTTTATTCTGGTGTTCCTTCTCGTTTTT
CTGGTTCTCGTTCTGGTACTGATTTTACTCTTACTATTTCTTCTCTTCAACCTGAAGATTTTGCTACTTATTATTGTC
AACAACATTATACTACTCCTCCTACTTTTGGTCAAGGTACCAAGGTGGAGATCAAACGTACGCATCATCACCATCACC
AT
SEQID NO. 299
ATGGATTTTCAGGTGCAGATTTTCAGCTTCCTGCTAATCAGTGCCTCAGTCATAATGTCTAGAATGGCCCAGGTCAAA
CTACAGGAGTCAGGGGCTGAGCTGGTGAAGCCTGGGGCCTCAGTGAAGATGTCCTGCAAGGCTTCTGGCTACACATTT
ACCAGTTACAATATGCACTGGGTAAAGCAGACACCTGGACAGGGCCTGGAATGGATTGGAGCTATTTATCCAGGAAAT
GGTGATACTTCCTACAATCAGAAGTTCAAAGGCAAGGCCACATTGACTGCAGACAAATCCTCCAGCACAGCCTACATG
CAGCTCAGCAGCCTGACATCTGAGGACTCTGCGGACTATTACTGTGCAAGATCTAATTATTACGGTAGTAGCTACTGG
TTCTTCGATGTCTGGGGCCAAGGGACCACGGTCACCGTCTCCTCAGGTGGAGGCGGTTCAGGCGGAGGTGGCTCTGGC
GGTGGCGGATCGGACATCGAGCTCACTCAGTCTCCAACAATCCTGTCTGCATCTCCAGGGGAGAAGGTCACAATGACT
TGCAGGGCCAGCTCAAGTGTAAATTACATGGACTGGTACCAGAAGAAGCCAGGATCCTCCCCCAAACCCTGGATTTAT
GCCACATCCAACCTGGCTTCTGGAGTCCCTGCTCGCTTCAGTGGCAGTGGGTCTGGGACCTCTTACTCTCTCACAATC
AGCAGAGTGGAGGCTGAAGATGCTGCCACTTATTACTGCCAGCAGTGGAGTTTTAATCCACCCACGTTCGGAGGGGGG
ACAAAGTTGGAAATAAAACGGGCCGCCGCTGGTGATCCCGCCGAGCCCAAATCTCCTGACAAAACTCACACATGCCCA
CCGTGCCCAGCACCTGAACTCCTGGGGGGACCGTCAGTCTTCCTCTTCCCCCCAAAACCCAAGGACACCCTCATGATC
TCCCGGACCCCTGAGGTCACATGCGTGGTGGTGGACGTGAGCCACGAAGACCCTGAGGTCAAGTTCAACTGGTACGTG
GACGGCGTGGAGGTGCATAATGCCAAGACAAAGCCGCGGGAGGAGCAGTACAACAGCACGTACCGTGTGGTCAGCGTC
CTCACCGTCCTGCACCAGGACTGGCTGAATGGCAAGGAGTACAAGTGCAAGGTCTCCAACAAAGCCCTCCCAGCCCCC
ATCGAGAAAACCATCTCCAAAGCCAAAGGGCAGCCCCGAGAACCACAGGTGTACACCCTGCCCCCATCCCGGGAGGAG
ATGACCAAGAACCAGGTCAGCCTGACCTGCCTGGTCAAAGGCTTCTATCCCAGCGACATCGCCGTGGAGTGGGAGAGC
AATGGGCAGCCGGAGAACAACTACAAGACCACGCCTCCCGTGCTGGACTCCGACGGCTCCTTCTTCCTCTACAGCAAG
CTCACCGTGGACAAGAGCAGGTGGCAGCAGGGGAACGTCTTCTCATGCTCCGTGATGCACGAGGCTCTGCACAACCAC
TACACGCAGAAGAGCCTCTCCCTGTCTCCGGGT
SEQID NO. 300
ATGGATTTTCAGGTGCAGATTTTCAGCTTCCTGCTAATCAGTGCCTCAGTCATAATGTCTAGAATGGCCCAGGTCAAA
CTACAGGAGTCAGGGGCTGAGCTGGTGAAGCCTGGGGCCTCAGTGAAGATGTCCTGCAAGGCTTCTGGCTACACATTT
ACCAGTTACAATATGCACTGGGTAAAGCAGACACCTGGACAGGGCCTGGAATGGATTGGAGCTATTTATCCAGGAAAT
GGTGATACTTCCTACAATCAGAAGTTCAAAGGCAAGGCCACATTGACTGCAGACAAATCCTCCAGCACAGCCTACATG
CAGCTCAGCAGCCTGACATCTGAGGACTCTGCGGACTATTACTGTGCAAGATCTAATTATTACGGTAGTAGCTACTGG
TTCTTCGATGTCTGGGGCCAAGGGACCACGGTCACCGTCTCCTCAGGTGGAGGCGGTTCAGGCGGAGGTGGCTCTGGC
GGTGGCGGATCGGACATCGAGCTCACTCAGTCTCCAACAATCCTGTCTGCATCTCCAGGGGAGAAGGTCACAATGACT
TGCAGGGCCAGCTCAAGTGTAAATTACATGGACTGGTACCAGAAGAAGCCAGGATCCTCCCCCAAACCCTGGATTTAT
GCCACATCCAACCTGGCTTCTGGAGTCCCTGCTCGCTTCAGTGGCAGTGGGTCTGGGACCTCTTACTCTCTCACAATC
AGCAGAGTGGAGGCTGAAGATGCTGCCACTTATTACTGCCAGCAGTGGAGTTTTAATCCACCCACGTTCGGAGGGGGG
ACAAAGTTGGAAATAAAACGGGCCGCCGCTCATCATCACCATCACCAT
SEQID NO. 301
ATGGATTTTCAGGTGCAGATTTTCAGCTTCCTGCTAATCAGTGCCTCAGTCATAATGTCTAGAGACATCGAGCTCACT
CAGTCTCCAACAATCCTGTCTGCATCTCCAGGGGAGAAGGTCACAATGACTTGCAGGGCCAGCTCAAGTGTAAATTAC
ATGGACTGGTACCAGAAGAAGCCAGGATCCTCCCCCAAACCCTGGATTTATGCCACATCCAACCTGGCTTCTGGAGTC
CCTGCTCGCTTCAGTGGCAGTGGGTCTGGGACCTCTTACTCTCTCACAATCAGCAGAGTGGAGGCTGAAGATGCTGCC
ACTTATTACTGCCAGCAGTGGAGTTTTAATCCACCCACGTTCGGAGGGGGGACAAAGTTGGAAATAAAACGGGGTGGA
GGCGGTTCAGGCGGAGGTGGCTCTGGCGGTGGCGGATCGATGGCCCAGGTCAAACTACAGGAGTCAGGGGCTGAGCTG
GTGAAGCCTGGGGCCTCAGTGAAGATGTCCTGCAAGGCTTCTGGCTACACATTTACCAGTTACAATATGCACTGGGTA
AAGCAGACACCTGGACAGGGCCTGGAATGGATTGGAGCTATTTATCCAGGAAATGGTGATACTTCCTACAATCAGAAG
TTCAAAGGCAAGGCCACATTGACTGCAGACAAATCCTCCAGCACAGCCTACATGCAGCTCAGCAGCCTGACATCTGAG
GACTCTGCGGACTATTACTGTGCAAGATCTAATTATTACGGTAGTAGCTACTGGTTCTTCGATGTCTGGGGCCAAGGG
ACCACGGTCACCGTCTCCTCAGCCGCCGCTGGTGATCCCGCCGAGCCCAAATCTCCTGACAAAACTCACACATGCCCA
CCGTGCCCAGCACCTGAACTCCTGGGGGGACCGTCAGTCTTCCTCTTCCCCCCAAAACCCAAGGACACCCTCATGATC
TCCCGGACCCCTGAGGTCACATGCGTGGTGGTGGACGTGAGCCACGAAGACCCTGAGGTCAAGTTCAACTGGTACGTG
GACGGCGTGGAGGTGCATAATGCCAAGACAAAGCCGCGGGAGGAGCAGTACAACAGCACGTACCGTGTGGTCAGCGTC
CTCACCGTCCTGCACCAGGACTGGCTGAATGGCAAGGAGTACAAGTGCAAGGTCTCCAACAAAGCCCTCCCAGCCCCC
ATCGAGAAAACCATCTCCAAAGCCAAAGGGCAGCCCCGAGAACCACAGGTGTACACCCTGCCCCCATCCCGGGAGGAG
ATGACCAAGAACCAGGTCAGCCTGACCTGCCTGGTCAAAGGCTTCTATCCCAGCGACATCGCCGTGGAGTGGGAGAGC
AATGGGCAGCCGGAGAACAACTACAAGACCACGCCTCCCGTGCTGGACTCCGACGGCTCCTTCTTCCTCTACAGCAAG
CTCACCGTGGACAAGAGCAGGTGGCAGCAGGGGAACGTCTTCTCATGCTCCGTGATGCACGAGGCTCTGCACAACCAC
TACACGCAGAAGAGCCTCTCCCTGTCTCCGGGT
SEQID NO. 302
ATGGATTTTCAGGTGCAGATTTTCAGCTTCCTGCTAATCAGTGCCTCAGTCATAATGTCTAGAGACATCGAGCTCACT
CAGTCTCCAACAATCCTGTCTGCATCTCCAGGGGAGAAGGTCACAATGACTTGCAGGGCCAGCTCAAGTGTAAATTAC
ATGGACTGGTACCAGAAGAAGCCAGGATCCTCCCCCAAACCCTGGATTTATGCCACATCCAACCTGGCTTCTGGAGTC
CCTGCTCGCTTCAGTGGCAGTGGGTCTGGGACCTCTTACTCTCTCACAATCAGCAGAGTGGAGGCTGAAGATGCTGCC
ACTTATTACTGCCAGCAGTGGAGTTTTAATCCACCCACGTTCGGAGGGGGGACAAAGTTGGAAATAAAACGGGGTGGA
GGCGGTTCAGGCGGAGGTGGCTCTGGCGGTGGCGGATCGATGGCCCAGGTCAAACTACAGGAGTCAGGGGCTGAGCTG
GTGAAGCCTGGGGCCTCAGTGAAGATGTCCTGCAAGGCTTCTGGCTACACATTTACCAGTTACAATATGCACTGGGTA
AAGCAGACACCTGGACAGGGCCTGGAATGGATTGGAGCTATTTATCCAGGAAATGGTGATACTTCCTACAATCAGAAG
TTCAAAGGCAAGGCCACATTGACTGCAGACAAATCCTCCAGCACAGCCTACATGCAGCTCAGCAGCCTGACATCTGAG
GACTCTGCGGACTATTACTGTGCAAGATCTAATTATTACGGTAGTAGCTACTGGTTCTTCGATGTCTGGGGCCAAGGG
ACCACGGTCACCGTCTCCTCAGCCGCCGCTCATCATCACCATCACCAT
SEQID NO. 303
ATGGAGTTTGGGCTGAGCTGGGTTTTCCTCGTTGCTCTTTTTAGAGGTGTCCAGTGTGAGGTGCAGCTGGTGGAGTCT
GGTGGTGGTCTTGTTCAACCTGGTGGTTCTCTTCGTCTTTCTTGTGCTGCTTCTGGTTTTAATATTAAAGATACTTAT
ATTCATTGGGTTCGTCAAGCTCCTGGTAAAGGTCTTGAATGGGTTGCTCGTATTTATCCTACTAATGGTTATACTCGT
TATGCTGATTCTGTTAAAGGTCGTTTTACTATTTCTGCTGATACTTCTAAAAATACTGCTTATCTTCAAATGAACTCT
CTTCGTGCTGAAGATACTGCTGTTTATTATTGTTCTCGTTGGGGTGGTGATGGTTTTTATGCTATGGATTATTGGGGT
CAAGGTACTCTTGTCACCGTCTCCTCAGCTAGCACCGGGGGAGGTGGGTCTGGAGGTGGAGGATCTGGTGGAGGTGGG
TCTGACATCCAGATGACCCAGTCTCCTTCTTCTCTTTCTGCTTCTGTTGGTGATCGTGTTACTATTACTTGTCGTGCT
TCTCAAGATGTTAATACTGCTGTTGCTTGGTATCAACAAAAACCTGGTAAAGCTCCTAAACTTCTTATTTATTCTGCT
TCTTTTCTTTATTCTGGTGTTCCTTCTCGTTTTTCTGGTTCTCGTTCTGGTACTGATTTTACTCTTACTATTTCTTCT
CTTCAACCTGAAGATTTTGCTACTTATTATTGTCAACAACATTATACTACTCCTCCTACTTTTGGTCAAGGTACCAAG
GTGGAGATCAAACGTACGGACAAAACTCACACATGCCCACCGTGCCCAGCACCTGAACTCCTGGGGGGACCGTCAGTC
TTCCTCTTCCCCCCAAAACCCAAGGACACCCTCATGATCTCCCGGACCCCTGAGGTCACATGCGTGGTGGTGGACGTG
AGCCACGAAGACCCTGAGGTCAAGTTCAACTGGTACGTGGACGGCGTGGAGGTGCATAATGCCAAGACAAAGCCGCGG
GAGGAGCAGTACAACAGCACGTACCGTGTGGTCAGCGTCCTCACCGTCCTGCACCAGGACTGGCTGAATGGCAAGGAG
TACAAGTGCAAGGTCTCCAACAAAGCCCTCCCAGCCCCCATCGAGAAAACCATCTCCAAAGCCAAAGGGCAGCCCCGA
GAACCACAGGTGTACACCCTGCCCCCATCCCGGGAGGAGATGACCAAGAACCAGGTCAGCCTGACCTGCCTGGTCAAA
GGCTTCTATCCCAGCGACATCGCCGTGGAGTGGGAGAGCAATGGGCAGCCGGAGAACAACTACAAGACCACGCCTCCC
GTGCTGGACTCCGACGGCTCCTTCTTCCTCTACAGCAAGCTCACCGTGGACAAGAGCAGGTGGCAGCAGGGGAACGTC
TTCTCATGCTCCGTGATGCACGAGGCTCTGCACAACCACTACACGCAGAAGAGCCTCTCCCTGTCTCCGGGT
SEQID NO. 304
ATGCCACCTCCTCGCCTCCTCTTCTTCCTCCTCTTCCTCACCCCCATGGAAGTCAGGCCCGAGGAACCTCTAGTGGTG
AAGGTGGAAGAGGGAGATAACGCTGTGCTGCAGTGCCTCAAGGGGACCTCAGATGGCCCCACTCAGCAGCTGACCTGG
TCTCGGGAGTCCCCGCTTAAACCCTTCTTAAAACTCAGCCTGGGGCTGCCAGGCCTGGGAATCCACATGAGGCCCCTG
GCCATCTGGCTTTTCATCTTCAACGTCTCTCAACAGATGGGGGGCTTCTACCTGTGCCAGCCGGGGCCCCCCTCTGAG
AAGGCCTGGCAGCCTGGCTGGACAGTCAATGTGGAGGGCAGCGGGGAGCTGTTCCGGTGGAATGTTTCGGACCTAGGT
GGCCTGGGCTGTGGCCTGAAGAACAGGTCCTCAGAGGGCCCCAGCTCCCCTTCCGGGAAGCTCATGAGCCCCAAGCTG
TATGTGTGGGCCAAAGACCGCCCTGAGATCTGGGAGGGAGAGCCTCCGTGTCTCCCACCGAGGGACAGCCTGAACCAG
AGCCTCAGCCAGGACCTCACCATGGCCCCTGGCTCCACACTCTGGCTGTCCTGTGGGGTACCCCCTGACTCTGTGTCC
AGGGGCCCCCTCTCCTGGACCCATGTGCACCCCAAGGGGCCTAAGTCATTGCTGAGCCTAGAGCTGAAGGACGATCGC
CCGGCCAGAGATATGTGGGTAATGGAGACGGGTCTGTTGTTGCCCCGGGCCACAGCTCAAGACGCTGGAAAGTATTAT
TGTCACCGTGGCAACCTGACCATGTCATTCCACCTGGAGATCACTGCTCGGCCAGGAGGAGGTGGGTCTGGAGGTGGA
GGATCTGGTGGAGGTGGGTCTGGAGGAGGTGGGTCTGGAGGAGGTGGGTCTGGAGGTGGAGGATCTGGTGGAGGTGGG
TCTATGGCCCAGGTCAAACTACAGGAGTCAGGGGCTGAGCTGGTGAAGCCTGGGGCCTCAGTGAAGATGTCCTGCAAG
GCTTCTGGCTACACATTTACCAGTTACAATATGCACTGGGTAAAGCAGACACCTGGACAGGGCCTGGAATGGATTGGA
GCTATTTATCCAGGAAATGGTGATACTTCCTACAATCAGAAGTTCAAAGGCAAGGCCACATTGACTGCAGACAAATCC
TCCAGCACAGCCTACATGCAGCTCAGCAGCCTGACATCTGAGGACTCTGCGGACTATTACTGTGCAAGATCTAATTAT
TACGGTAGTAGCTACTGGTTCTTCGATGTCTGGGGCCAAGGGACCACGGTCACCGTCTCCTCAGGTGGAGGCGGTTCA
GGCGGAGGTGGCTCTGGCGGTGGCGGATCGGACATCGAGCTCACTCAGTCTCCAACAATCCTGTCTGCATCTCCAGGG
GAGAAGGTCACAATGACTTGCAGGGCCAGCTCAAGTGTAAATTACATGGACTGGTACCAGAAGAAGCCAGGATCCTCC
CCCAAACCCTGGATTTATGCCACATCCAACCTGGCTTCTGGAGTCCCTGCTCGCTTCAGTGGCAGTGGGTCTGGGACC
TCTTACTCTCTCACAATCAGCAGAGTGGAGGCTGAAGATGCTGCCACTTATTACTGCCAGCAGTGGAGTTTTAATCCA
CCCACGTTCGGAGGGGGGACAAAGTTGGAAATAAAACGGGCCGCCGCTGGTGATCCCGCCGAGCCCAAATCTCCTGAC
AAAACTCACACATGCCCACCGTGCCCAGCACCTGAACTCCTGGGGGGACCGTCAGTCTTCCTCTTCCCCCCAAAACCC
AAGGACACCCTCATGATCTCCCGGACCCCTGAGGTCACATGCGTGGTGGTGGACGTGAGCCACGAAGACCCTGAGGTC
AAGTTCAACTGGTACGTGGACGGCGTGGAGGTGCATAATGCCAAGACAAAGCCGCGGGAGGAGCAGTACAACAGCACG
TACCGTGTGGTCAGCGTCCTCACCGTCCTGCACCAGGACTGGCTGAATGGCAAGGAGTACAAGTGCAAGGTCTCCAAC
AAAGCCCTCCCAGCCCCCATCGAGAAAACCATCTCCAAAGCCAAAGGGCAGCCCCGAGAACCACAGGTGTACACCCTG
CCCCCATCCCGGGAGGAGATGACCAAGAACCAGGTCAGCCTGACCTGCCTGGTCAAAGGCTTCTATCCCAGCGACATC
GCCGTGGAGTGGGAGAGCAATGGGCAGCCGGAGAACAACTACAAGACCACGCCTCCCGTGCTGGACTCCGACGGCTCC
TTCTTCCTCTACAGCAAGCTCACCGTGGACAAGAGCAGGTGGCAGCAGGGGAACGTCTTCTCATGCTCCGTGATGCAC
GAGGCTCTGCACAACCACTACACGCAGAAGAGCCTCTCCCTGTCTCCGGGT
SEQID NO. 305
ATGCCACCTCCTCGCCTCCTCTTCTTCCTCCTCTTCCTCACCCCCATGGAAGTCAGGCCCGAGGAACCTCTAGTGGTG
AAGGTGGAAGAGGGAGATAACGCTGTGCTGCAGTGCCTCAAGGGGACCTCAGATGGCCCCACTCAGCAGCTGACCTGG
TCTCGGGAGTCCCCGCTTAAACCCTTCTTAAAACTCAGCCTGGGGCTGCCAGGCCTGGGAATCCACATGAGGCCCCTG
GCCATCTGGCTTTTCATCTTCAACGTCTCTCAACAGATGGGGGGCTTCTACCTGTGCCAGCCGGGGCCCCCCTCTGAG
AAGGCCTGGCAGCCTGGCTGGACAGTCAATGTGGAGGGCAGCGGGGAGCTGTTCCGGTGGAATGTTTCGGACCTAGGT
GGCCTGGGCTGTGGCCTGAAGAACAGGTCCTCAGAGGGCCCCAGCTCCCCTTCCGGGAAGCTCATGAGCCCCAAGCTG
TATGTGTGGGCCAAAGACCGCCCTGAGATCTGGGAGGGAGAGCCTCCGTGTCTCCCACCGAGGGACAGCCTGAACCAG
AGCCTCAGCCAGGACCTCACCATGGCCCCTGGCTCCACACTCTGGCTGTCCTGTGGGGTACCCCCTGACTCTGTGTCC
AGGGGCCCCCTCTCCTGGACCCATGTGCACCCCAAGGGGCCTAAGTCATTGCTGAGCCTAGAGCTGAAGGACGATCGC
CCGGCCAGAGATATGTGGGTAATGGAGACGGGTCTGTTGTTGCCCCGGGCCACAGCTCAAGACGCTGGAAAGTATTAT
TGTCACCGTGGCAACCTGACCATGTCATTCCACCTGGAGATCACTGCTCGGCCAGGAGGAGGTGGGTCTGGAGGTGGA
GGATCTGGTGGAGGTGGGTCTGGAGGAGGTGGGTCTGGAGGAGGTGGGTCTGGAGGTGGAGGATCTGGTGGAGGTGGG
TCTATGGCCCAGGTCAAACTACAGGAGTCAGGGGCTGAGCTGGTGAAGCCTGGGGCCTCAGTGAAGATGTCCTGCAAG
GCTTCTGGCTACACATTTACCAGTTACAATATGCACTGGGTAAAGCAGACACCTGGACAGGGCCTGGAATGGATTGGA
GCTATTTATCCAGGAAATGGTGATACTTCCTACAATCAGAAGTTCAAAGGCAAGGCCACATTGACTGCAGACAAATCC
TCCAGCACAGCCTACATGCAGCTCAGCAGCCTGACATCTGAGGACTCTGCGGACTATTACTGTGCAAGATCTAATTAT
TACGGTAGTAGCTACTGGTTCTTCGATGTCTGGGGCCAAGGGACCACGGTCACCGTCTCCTCAGGTGGAGGCGGTTCA
GGCGGAGGTGGCTCTGGCGGTGGCGGATCGGACATCGAGCTCACTCAGTCTCCAACAATCCTGTCTGCATCTCCAGGG
GAGAAGGTCACAATGACTTGCAGGGCCAGCTCAAGTGTAAATTACATGGACTGGTACCAGAAGAAGCCAGGATCCTCC
CCCAAACCCTGGATTTATGCCACATCCAACCTGGCTTCTGGAGTCCCTGCTCGCTTCAGTGGCAGTGGGTCTGGGACC
TCTTACTCTCTCACAATCAGCAGAGTGGAGGCTGAAGATGCTGCCACTTATTACTGCCAGCAGTGGAGTTTTAATCCA
CCCACGTTCGGAGGGGGGACAAAGTTGGAAATAAAACGGGCCGCCGCTCATCATCACCATCACCAT
SEQID NO. 306
ATGCCACCTCCTCGCCTCCTCTTCTTCCTCCTCTTCCTCACCCCCATGGAAGTCAGGCCCGAGGAACCTCTAGTGGTG
AAGGTGGAAGAGGGAGATAACGCTGTGCTGCAGTGCCTCAAGGGGACCTCAGATGGCCCCACTCAGCAGCTGACCTGG
TCTCGGGAGTCCCCGCTTAAACCCTTCTTAAAACTCAGCCTGGGGCTGCCAGGCCTGGGAATCCACATGAGGCCCCTG
GCCATCTGGCTTTTCATCTTCAACGTCTCTCAACAGATGGGGGGCTTCTACCTGTGCCAGCCGGGGCCCCCCTCTGAG
AAGGCCTGGCAGCCTGGCTGGACAGTCAATGTGGAGGGCAGCGGGGAGCTGTTCCGGTGGAATGTTTCGGACCTAGGT
GGCCTGGGCTGTGGCCTGAAGAACAGGTCCTCAGAGGGCCCCAGCTCCCCTTCCGGGAAGCTCATGAGCCCCAAGCTG
TATGTGTGGGCCAAAGACCGCCCTGAGATCTGGGAGGGAGAGCCTCCGTGTCTCCCACCGAGGGACAGCCTGAACCAG
AGCCTCAGCCAGGACCTCACCATGGCCCCTGGCTCCACACTCTGGCTGTCCTGTGGGGTACCCCCTGACTCTGTGTCC
AGGGGCCCCCTCTCCTGGACCCATGTGCACCCCAAGGGGCCTAAGTCATTGCTGAGCCTAGAGCTGAAGGACGATCGC
CCGGCCAGAGATATGTGGGTAATGGAGACGGGTCTGTTGTTGCCCCGGGCCACAGCTCAAGACGCTGGAAAGTATTAT
TGTCACCGTGGCAACCTGACCATGTCATTCCACCTGGAGATCACTGCTCGGCCAGATCCCGCCGAGCCCAAATCTCCT
GACAAAACTCACACATGCCCACCGTGCCCAGCACCTGAACTCCTGGGGGGACCGTCAGTCTTCCTCTTCCCCCCAAAA
CCCAAGGACACCCTCATGATCTCCCGGACCCCTGAGGTCACATGCGTGGTGGTGGACGTGAGCCACGAAGACCCTGAG
GTCAAGTTCAACTGGTACGTGGACGGCGTGGAGGTGCATAATGCCAAGACAAAGCCGCGGGAGGAGCAGTACAACAGC
ACGTACCGTGTGGTCAGCGTCCTCACCGTCCTGCACCAGGACTGGCTGAATGGCAAGGAGTACAAGTGCAAGGTCTCC
AACAAAGCCCTCCCAGCCCCCATCGAGAAAACCATCTCCAAAGCCAAAGGGCAGCCCCGAGAACCACAGGTGTACACC
CTGCCCCCATCCCGGGAGGAGATGACCAAGAACCAGGTCAGCCTGACCTGCCTGGTCAAAGGCTTCTATCCCAGCGAC
ATCGCCGTGGAGTGGGAGAGCAATGGGCAGCCGGAGAACAACTACAAGACCACGCCTCCCGTGCTGGACTCCGACGGC
TCCTTCTTCCTCTACAGCAAGCTCACCGTGGACAAGAGCAGGTGGCAGCAGGGGAACGTCTTCTCATGCTCCGTGATG
CACGAGGCTCTGCACAACCACTACACGCAGAAGAGCCTCTCCCTGTCTCCGGGTGGAGGAGGTGGGTCTGGAGGTGGA
GGATCTGGTGGAGGTGGGTCTGGAGGAGGTGGGTCTATGGCCCAGGTCAAACTACAGGAGTCAGGGGCTGAGCTGGTG
AAGCCTGGGGCCTCAGTGAAGATGTCCTGCAAGGCTTCTGGCTACACATTTACCAGTTACAATATGCACTGGGTAAAG
CAGACACCTGGACAGGGCCTGGAATGGATTGGAGCTATTTATCCAGGAAATGGTGATACTTCCTACAATCAGAAGTTC
AAAGGCAAGGCCACATTGACTGCAGACAAATCCTCCAGCACAGCCTACATGCAGCTCAGCAGCCTGACATCTGAGGAC
TCTGCGGACTATTACTGTGCAAGATCTAATTATTACGGTAGTAGCTACTGGTTCTTCGATGTCTGGGGCCAAGGGACC
ACGGTCACCGTCTCCTCAGGTGGAGGCGGTTCAGGCGGAGGTGGCTCTGGCGGTGGCGGATCGGACATCGAGCTCACT
CAGTCTCCAACAATCCTGTCTGCATCTCCAGGGGAGAAGGTCACAATGACTTGCAGGGCCAGCTCAAGTGTAAATTAC
ATGGACTGGTACCAGAAGAAGCCAGGATCCTCCCCCAAACCCTGGATTTATGCCACATCCAACCTGGCTTCTGGAGTC
CCTGCTCGCTTCAGTGGCAGTGGGTCTGGGACCTCTTACTCTCTCACAATCAGCAGAGTGGAGGCTGAAGATGCTGCC
ACTTATTACTGCCAGCAGTGGAGTTTTAATCCACCCACGTTCGGAGGGGGGACAAAGTTGGAAATAAAACGGGCT
SEQID NO. 307
ATGGATTTTCAGGTGCAGATTTTCAGCTTCCTGCTAATCAGTGCCTCAGTCATAATGTCTAGAATGGCCCAGGTCAAA
CTACAGGAGTCAGGGGCTGAGCTGGTGAAGCCTGGGGCCTCAGTGAAGATGTCCTGCAAGGCTTCTGGCTACACATTT
ACCAGTTACAATATGCACTGGGTAAAGCAGACACCTGGACAGGGCCTGGAATGGATTGGAGCTATTTATCCAGGAAAT
GGTGATACTTCCTACAATCAGAAGTTCAAAGGCAAGGCCACATTGACTGCAGACAAATCCTCCAGCACAGCCTACATG
CAGCTCAGCAGCCTGACATCTGAGGACTCTGCGGACTATTACTGTGCAAGATCTAATTATTACGGTAGTAGCTACTGG
TTCTTCGATGTCTGGGGCCAAGGGACCACGGTCACCGTCTCCTCAGGTGGAGGCGGTTCAGGCGGAGGTGGCTCTGGC
GGTGGCGGATCGGACATCGAGCTCACTCAGTCTCCAACAATCCTGTCTGCATCTCCAGGGGAGAAGGTCACAATGACT
TGCAGGGCCAGCTCAAGTGTAAATTACATGGACTGGTACCAGAAGAAGCCAGGATCCTCCCCCAAACCCTGGATTTAT
GCCACATCCAACCTGGCTTCTGGAGTCCCTGCTCGCTTCAGTGGCAGTGGGTCTGGGACCTCTTACTCTCTCACAATC
AGCAGAGTGGAGGCTGAAGATGCTGCCACTTATTACTGCCAGCAGTGGAGTTTTAATCCACCCACGTTCGGAGGGGGG
ACAAAGTTGGAAATAAAACGGGCCGCCGCTGGAGGAGGTGGGTCTGGAGGTGGAGGATCTGGTGGAGGTGGGTCTGGA
GGAGGTGGGTCTCCCGAGGAACCTCTAGTGGTGAAGGTGGAAGAGGGAGATAACGCTGTGCTGCAGTGCCTCAAGGGG
ACCTCAGATGGCCCCACTCAGCAGCTGACCTGGTCTCGGGAGTCCCCGCTTAAACCCTTCTTAAAACTCAGCCTGGGG
CTGCCAGGCCTGGGAATCCACATGAGGCCCCTGGCCATCTGGCTTTTCATCTTCAACGTCTCTCAACAGATGGGGGGC
TTCTACCTGTGCCAGCCGGGGCCCCCCTCTGAGAAGGCCTGGCAGCCTGGCTGGACAGTCAATGTGGAGGGCAGCGGG
GAGCTGTTCCGGTGGAATGTTTCGGACCTAGGTGGCCTGGGCTGTGGCCTGAAGAACAGGTCCTCAGAGGGCCCCAGC
TCCCCTTCCGGGAAGCTCATGAGCCCCAAGCTGTATGTGTGGGCCAAAGACCGCCCTGAGATCTGGGAGGGAGAGCCT
CCGTGTCTCCCACCGAGGGACAGCCTGAACCAGAGCCTCAGCCAGGACCTCACCATGGCCCCTGGCTCCACACTCTGG
CTGTCCTGTGGGGTACCCCCTGACTCTGTGTCCAGGGGCCCCCTCTCCTGGACCCATGTGCACCCCAAGGGGCCTAAG
TCATTGCTGAGCCTAGAGCTGAAGGACGATCGCCCGGCCAGAGATATGTGGGTAATGGAGACGGGTCTGTTGTTGCCC
CGGGCCACAGCTCAAGACGCTGGAAAGTATTATTGTCACCGTGGCAACCTGACCATGTCATTCCACCTGGAGATCACT
GCTCGGCCAGATCCCGCCGAGCCCAAATCTCCTGACAAAACTCACACATGCCCACCGTGCCCAGCACCTGAACTCCTG
GGGGGACCGTCAGTCTTCCTCTTCCCCCCAAAACCCAAGGACACCCTCATGATCTCCCGGACCCCTGAGGTCACATGC
GTGGTGGTGGACGTGAGCCACGAAGACCCTGAGGTCAAGTTCAACTGGTACGTGGACGGCGTGGAGGTGCATAATGCC
AAGACAAAGCCGCGGGAGGAGCAGTACAACAGCACGTACCGTGTGGTCAGCGTCCTCACCGTCCTGCACCAGGACTGG
CTGAATGGCAAGGAGTACAAGTGCAAGGTCTCCAACAAAGCCCTCCCAGCCCCCATCGAGAAAACCATCTCCAAAGCC
AAAGGGCAGCCCCGAGAACCACAGGTGTACACCCTGCCCCCATCCCGGGAGGAGATGACCAAGAACCAGGTCAGCCTG
ACCTGCCTGGTCAAAGGCTTCTATCCCAGCGACATCGCCGTGGAGTGGGAGAGCAATGGGCAGCCGGAGAACAACTAC
AAGACCACGCCTCCCGTGCTGGACTCCGACGGCTCCTTCTTCCTCTACAGCAAGCTCACCGTGGACAAGAGCAGGTGG
CAGCAGGGGAACGTCTTCTCATGCTCCGTGATGCACGAGGCTCTGCACAACCACTACACGCAGAAGAGCCTCTCCCTG
TCTCCGGGT
SEQID NO. 308
ATGCTCAGGCTGCTCTTGGCTCTCAACTTATTCCCTTCAATTCAAGTAACAGGAGACATCCAGATGACACAGACTACA
TCCTCCCTGTCTGCCTCTCTGGGAGACAGAGTCACCATCAGTTGCAGGGCAAGTCAGGACATTAGTAAATATTTAAAT
TGGTATCAGCAGAAACCAGATGGAACTGTTAAACTCCTGATCTACCATACATCAAGATTACACTCAGGAGTCCCATCA
AGGTTCAGTGGCAGTGGGTCTGGAACAGATTATTCTCTCACCATTAGCAACCTGGAGCAAGAAGATATTGCCACTTAC
TTTTGCCAACAGGGTAATACGCTTCCGTACACGTTCGGAGGGGGGACTAAGTTGGAAATAACAGGAGGAGGTGGGTCT
GGAGGTGGAGGATCTGGTGGAGGTGGGTCTGGAGGAGGTGGGTCTGAGGTGAAACTGCAGGAGTCAGGACCTGGCCTG
GTGGCGCCCTCACAGAGCCTGTCCGTCACATGCACTGTCTCAGGGGTCTCATTACCCGACTATGGTGTAAGCTGGATT
CGCCAGCCTCCACGAAAGGGTCTGGAGTGGCTGGGAGTAATATGGGGTAGTGAAACCACATACTATAATTCAGCTCTC
AAATCCAGACTGACCATCATCAAGGACAACTCCAAGAGCCAAGTTTTCTTAAAAATGAACAGTCTGCAAACTGATGAC
ACAGCCATTTACTACTGTGCCAAACATTATTACTACGGTGGTAGCTATGCTATGGACTACTGGGGTCAAGGAACCTCA
GTCACCGTCTCCTCAGACTACAAAGACGATGACGACAAGATTGAAGTTATGTATCCTCCTCCTTACCTAGACAATGAG
AAGAGCAATGGAACCATTATCCATGTGAAAGGGAAACACCTTTGTCCAAGTCCCCTATTTCCCGGACCTTCTAAGCCC
TTTTGGGTGCTGGTGGTGGTTGGTGGAGTCCTGGCTTGCTATAGCTTGCTAGTAACAGTGGCCTTTATTATTTTCTGG
GTGAGGAGTAAGAGGAGCAGGCTCCTGCACAGTGACTACATGAACATGACTCCCCGCCGCCCCGGGCCCACCCGCAAG
CATTACCAGCCCTATGCCCCACCACGCGACTTCGCAGCCTATCGCTCCAAACGGGGCAGAAAGAAACTCCTGTATATA
TTCAAACAACCATTTATGAGACCAGTACAAACTACTCAAGAGGAAGATGGCTGTAGCTGCCGATTTCCAGAAGAAGAA
GAAGGAGGATGTGAACTGAGAGTGAAGTTCAGCAGGAGCGCAGACGCCCCCGCGTACCAGCAGGGCCAGAACCAGCTC
TATAACGAGCTCAATCTAGGACGAAGAGAGGAGTACGATGTTTTGGACAAGAGACGTGGCCGGGACCCTGAGATGGGG
GGAAAGCCGCAGAGAAGGAAGAACCCTCAGGAAGGCCTGTACAATGAACTGCAGAAAGATAAGATGGCGGAGGCCTAC
AGTGAGATTGGGATGAAAGGCGAGCGCCGGAGGGGCAAGGGGCACGATGGCCTTTACCAGGGTCTCAGTACAGCCACC
AAGGACACCTACGACGCCCTTCACATGCAGGCCCTGCCCCCTCGCGAGGGCAGAGGAAGTCTTCTAACATGCGGTGAC
GTGGAGGAGAATCCCGGCCCTATGCCACCTCCTCGCCTCCTCTTCTTCCTCCTCTTCCTCACCCCCATGGAAGTCAGG
CCCGAGGAACCTCTAGTGGTGAAGGTGGAAGAGGGAGATAACGCTGTGCTGCAGTGCCTCAAGGGGACCTCAGATGGC
CCCACTCAGCAGCTGACCTGGTCTCGGGAGTCCCCGCTTAAACCCTTCTTAAAACTCAGCCTGGGGCTGCCAGGCCTG
GGAATCCACATGAGGCCCCTGGCCATCTGGCTTTTCATCTTCAACGTCTCTCAACAGATGGGGGGCTTCTACCTGTGC
CAGCCGGGGCCCCCCTCTGAGAAGGCCTGGCAGCCTGGCTGGACAGTCAATGTGGAGGGCAGCGGGGAGCTGTTCCGG
TGGAATGTTTCGGACCTAGGTGGCCTGGGCTGTGGCCTGAAGAACAGGTCCTCAGAGGGCCCCAGCTCCCCTTCCGGG
AAGCTCATGAGCCCCAAGCTGTATGTGTGGGCCAAAGACCGCCCTGAGATCTGGGAGGGAGAGCCTCCGTGTCTCCCA
CCGAGGGACAGCCTGAACCAGAGCCTCAGCCAGGACCTCACCATGGCCCCTGGCTCCACACTCTGGCTGTCCTGTGGG
GTACCCCCTGACTCTGTGTCCAGGGGCCCCCTCTCCTGGACCCATGTGCACCCCAAGGGGCCTAAGTCATTGCTGAGC
CTAGAGCTGAAGGACGATCGCCCGGCCAGAGATATGTGGGTAATGGAGACGGGTCTGTTGTTGCCCCGGGCCACAGCT
CAAGACGCTGGAAAGTATTATTGTCACCGTGGCAACCTGACCATGTCATTCCACCTGGAGATCACTGCTCGGCCAGGG
GGAGGTGGGTCTGGAGGTGGAGGATCTGGTGGAGGTGGGTCTGGTGGAGGTGGGTCTGAGGTGCAGCTGGTGGAGTCT
GGTGGTGGTCTTGTTCAACCTGGTGGTTCTCTTCGTCTTTCTTGTGCTGCTTCTGGTTTTAATATTAAAGATACTTAT
ATTCATTGGGTTCGTCAAGCTCCTGGTAAAGGTCTTGAATGGGTTGCTCGTATTTATCCTACTAATGGTTATACTCGT
TATGCTGATTCTGTTAAAGGTCGTTTTACTATTTCTGCTGATACTTCTAAAAATACTGCTTATCTTCAAATGAACTCT
CTTCGTGCTGAAGATACTGCTGTTTATTATTGTTCTCGTTGGGGTGGTGATGGTTTTTATGCTATGGATTATTGGGGT
CAAGGTACTCTTGTCACCGTCTCCTCAGCTAGCACCGGGGGAGGTGGGTCTGGAGGTGGAGGATCTGGTGGAGGTGGG
TCTGACATCCAGATGACCCAGTCTCCTTCTTCTCTTTCTGCTTCTGTTGGTGATCGTGTTACTATTACTTGTCGTGCT
TCTCAAGATGTTAATACTGCTGTTGCTTGGTATCAACAAAAACCTGGTAAAGCTCCTAAACTTCTTATTTATTCTGCT
TCTTTTCTTTATTCTGGTGTTCCTTCTCGTTTTTCTGGTTCTCGTTCTGGTACTGATTTTACTCTTACTATTTCTTCT
CTTCAACCTGAAGATTTTGCTACTTATTATTGTCAACAACATTATACTACTCCTCCTACTTTTGGTCAAGGTACCAAG
GTGGAGATCAAACGTACGTCTAGACATCATCACCATCACCAT
SEQID NO. 309
ATGCCACCTCCTCGCCTCCTCTTCTTCCTCCTCTTCCTCACCCCCATGGAAGTCAGGCCCGAGGAACCTCTAGTGGTG
AAGGTGGAAGAGGGAGATAACGCTGTGCTGCAGTGCCTCAAGGGGACCTCAGATGGCCCCACTCAGCAGCTGACCTGG
TCTCGGGAGTCCCCGCTTAAACCCTTCTTAAAACTCAGCCTGGGGCTGCCAGGCCTGGGAATCCACATGAGGCCCCTG
GCCATCTGGCTTTTCATCTTCAACGTCTCTCAACAGATGGGGGGCTTCTACCTGTGCCAGCCGGGGCCCCCCTCTGAG
AAGGCCTGGCAGCCTGGCTGGACAGTCAATGTGGAGGGCAGCGGGGAGCTGTTCCGGTGGAATGTTTCGGACCTAGGT
GGCCTGGGCTGTGGCCTGAAGAACAGGTCCTCAGAGGGCCCCAGCTCCCCTTCCGGGAAGCTCATGAGCCCCAAGCTG
TATGTGTGGGCCAAAGACCGCCCTGAGATCTGGGAGGGAGAGCCTCCGTGTCTCCCACCGAGGGACAGCCTGAACCAG
AGCCTCAGCCAGGACCTCACCATGGCCCCTGGCTCCACACTCTGGCTGTCCTGTGGGGTACCCCCTGACTCTGTGTCC
AGGGGCCCCCTCTCCTGGACCCATGTGCACCCCAAGGGGCCTAAGTCATTGCTGAGCCTAGAGCTGAAGGACGATCGC
CCGGCCAGAGATATGTGGGTAATGGAGACGGGTCTGTTGTTGCCCCGGGCCACAGCTCAAGACGCTGGAAAGTATTAT
TGTCACCGTGGCAACCTGACCATGTCATTCCACCTGGAGATCACTGCTCGGCCAGGGGGAGGTGGGTCTGGAGGTGGA
GGATCTGGTGGAGGTGGGTCTGGTGGAGGTGGGTCTGAGGTGCAGCTGGTGGAGTCTGGTGGTGGTCTTGTTCAACCT
GGTGGTTCTCTTCGTCTTTCTTGTGCTGCTTCTGGTTTTAATATTAAAGATACTTATATTCATTGGGTTCGTCAAGCT
CCTGGTAAAGGTCTTGAATGGGTTGCTCGTATTTATCCTACTAATGGTTATACTCGTTATGCTGATTCTGTTAAAGGT
CGTTTTACTATTTCTGCTGATACTTCTAAAAATACTGCTTATCTTCAAATGAACTCTCTTCGTGCTGAAGATACTGCT
GTTTATTATTGTTCTCGTTGGGGTGGTGATGGTTTTTATGCTATGGATTATTGGGGTCAAGGTACTCTTGTCACCGTC
TCCTCAGCTAGCACCGGGGGAGGTGGGTCTGGAGGTGGAGGATCTGGTGGAGGTGGGTCTGACATCCAGATGACCCAG
TCTCCTTCTTCTCTTTCTGCTTCTGTTGGTGATCGTGTTACTATTACTTGTCGTGCTTCTCAAGATGTTAATACTGCT
GTTGCTTGGTATCAACAAAAACCTGGTAAAGCTCCTAAACTTCTTATTTATTCTGCTTCTTTTCTTTATTCTGGTGTT
CCTTCTCGTTTTTCTGGTTCTCGTTCTGGTACTGATTTTACTCTTACTATTTCTTCTCTTCAACCTGAAGATTTTGCT
ACTTATTATTGTCAACAACATTATACTACTCCTCCTACTTTTGGTCAAGGTACCAAGGTGGAGATCAAACGTACGTCT
AGACATCATCACCATCACCATGAGGGCAGAGGAAGTCTTCTAACATGCGGTGACGTGGAGGAGAATCCCGGCCCTATG
CTCAGGCTGCTCTTGGCTCTCAACTTATTCCCTTCAATTCAAGTAACAGGAGACATCCAGATGACACAGACTACATCC
TCCCTGTCTGCCTCTCTGGGAGACAGAGTCACCATCAGTTGCAGGGCAAGTCAGGACATTAGTAAATATTTAAATTGG
TATCAGCAGAAACCAGATGGAACTGTTAAACTCCTGATCTACCATACATCAAGATTACACTCAGGAGTCCCATCAAGG
TTCAGTGGCAGTGGGTCTGGAACAGATTATTCTCTCACCATTAGCAACCTGGAGCAAGAAGATATTGCCACTTACTTT
TGCCAACAGGGTAATACGCTTCCGTACACGTTCGGAGGGGGGACTAAGTTGGAAATAACAGGAGGAGGTGGGTCTGGA
GGTGGAGGATCTGGTGGAGGTGGGTCTGGAGGAGGTGGGTCTGAGGTGAAACTGCAGGAGTCAGGACCTGGCCTGGTG
GCGCCCTCACAGAGCCTGTCCGTCACATGCACTGTCTCAGGGGTCTCATTACCCGACTATGGTGTAAGCTGGATTCGC
CAGCCTCCACGAAAGGGTCTGGAGTGGCTGGGAGTAATATGGGGTAGTGAAACCACATACTATAATTCAGCTCTCAAA
TCCAGACTGACCATCATCAAGGACAACTCCAAGAGCCAAGTTTTCTTAAAAATGAACAGTCTGCAAACTGATGACACA
GCCATTTACTACTGTGCCAAACATTATTACTACGGTGGTAGCTATGCTATGGACTACTGGGGTCAAGGAACCTCAGTC
ACCGTCTCCTCAGACTACAAAGACGATGACGACAAGATTGAAGTTATGTATCCTCCTCCTTACCTAGACAATGAGAAG
AGCAATGGAACCATTATCCATGTGAAAGGGAAACACCTTTGTCCAAGTCCCCTATTTCCCGGACCTTCTAAGCCCTTT
TGGGTGCTGGTGGTGGTTGGTGGAGTCCTGGCTTGCTATAGCTTGCTAGTAACAGTGGCCTTTATTATTTTCTGGGTG
AGGAGTAAGAGGAGCAGGCTCCTGCACAGTGACTACATGAACATGACTCCCCGCCGCCCCGGGCCCACCCGCAAGCAT
TACCAGCCCTATGCCCCACCACGCGACTTCGCAGCCTATCGCTCCAAACGGGGCAGAAAGAAACTCCTGTATATATTC
AAACAACCATTTATGAGACCAGTACAAACTACTCAAGAGGAAGATGGCTGTAGCTGCCGATTTCCAGAAGAAGAAGAA
GGAGGATGTGAACTGAGAGTGAAGTTCAGCAGGAGCGCAGACGCCCCCGCGTACCAGCAGGGCCAGAACCAGCTCTAT
AACGAGCTCAATCTAGGACGAAGAGAGGAGTACGATGTTTTGGACAAGAGACGTGGCCGGGACCCTGAGATGGGGGGA
AAGCCGCAGAGAAGGAAGAACCCTCAGGAAGGCCTGTACAATGAACTGCAGAAAGATAAGATGGCGGAGGCCTACAGT
GAGATTGGGATGAAAGGCGAGCGCCGGAGGGGCAAGGGGCACGATGGCCTTTACCAGGGTCTCAGTACAGCCACCAAG
GACACCTACGACGCCCTTCACATGCAGGCCCTGCCCCCTCGC
SEQID NO. 310
GATATCGAATTAGGAGGAAAACTGTTTCATACAGAAGGCGTCAATTAGGAGGAAAAACTGTTTCATACAGAAGGCGTC
AATTAGGAGGAAAAACTGTTTCATACAGAAGGCGTCAATTGGTCCCATCGAATTAGGAGGAAAAACTGTTTCATACAG
AAGGCGTCAATTAGGAGGAAAAACTGTTTCATACAGAAGGCGTCAATTAGGAGGAAAAACTGTTTCATACAGAAGGCG
TCAATTGGTCCCGGGACATTTTGACACCCCCATAATATTTTTCCAGAATTAACAGTATAAATTGCATCTCTTGTTCAA
GAGTTCCCTATCACTCTCTTTAATCACTACTCACAGTAACCTCAACTCCTGGCGGCCGCGCCACCATGCCACCTCCTC
GCCTCCTCTTCTTCCTCCTCTTCCTCACCCCCATGGAAGTCAGGCCCGAGGAACCTCTAGTGGTGAAGGTGGAAGAGG
GAGATAACGCTGTGCTGCAGTGCCTCAAGGGGACCTCAGATGGCCCCACTCAGCAGCTGACTTGGTCTCGGGAGTCCC
CGCTTAAACCCTTCTTAAAACTCAGCCTGGGGCTGCCAGGCCTGGGAATCCACATGAGGCCCCTGGCCATCTGGCTTT
TCATCTTCAACGTCTCTCAACAGATGGGGGGCTTCTACCTGTGCCAGCCGGGGCCCCCCTCTGAGAAGGCCTGGCAGC
CTGGCTGGACAGTCAATGTGGAGGGCAGCGGGGAGCTGTTCCGGTGGAATGTTTCGGACCTAGGTGGCCTGGGCTGTG
GCCTGAAGAACAGGTCCTCAGAGGGCCCCAGCTCCCCTTCCGGGAAGCTCATGAGCCCCAAGCTGTATGTGTGGGCCA
AAGACCGCCCTGAGATCTGGGAGGGAGAGCCTCCGTGTCTCCCACCGAGGGACAGCCTGAACCAGAGCCTCAGCCAGG
ACCTCACCATGGCCCCTGGCTCCACACTCTGGCTGTCCTGTGGGGTACCCCCTGACTCTGTGTCCAGGGGCCCCCTCT
CCTGGACCCATGTGCACCCCAAGGGGCCTAAGTCATTGCTGAGCCTAGAGCTGAAGGACGATCGCCCGGCCAGAGATA
TGTGGGTAATGGAGACGGGTCTGTTGTTGCCCCGGGCCACAGCTCAAGACGCTGGAAAGTATTATTGTCACCGTGGCA
ACCTGACCATGTCATTCCACCTGGAGATCACTGCTCGGCCAGGGGGAGGTGGGTCTGGAGGTGGAGGATCTGGTGGAG
GTGGGTCTGGTGGAGGTGGGTCTGAGGTGCAGCTGGTGGAGTCTGGTGGTGGTCTTGTTCAACCCGGTGGTTCTCTTC
GTCTTTCTTGTGCTGCTTCTGGTTTTAATATTAAAGATACTTATATTCATTGGGTTCGTCAAGCTCCTGGTAAAGGTC
TTGAATGGGTTGCTCGTATTTATCCTACTAATGGTTATACTCGTTATGCTGATTCTGTTAAAGGTCGTTTTACTATTT
CTGCTGATACTTCTAAAAATACTGCTTATCTTCAAATGAACTCTCTTCGTGCTGAAGATACTGCTGTTTATTATTGTT
CTCGTTGGGGTGGTGATGGTTTTTATGCTATGGATTATTGGGGTCAAGGTACTCTTGTCACCGTCTCCTCAGCTAGCA
CCGGGGGAGGTGGGTCTGGAGGTGGAGGATCTGGTGGAGGTGGGTCTGACATCCAGATGACCCAGTCTCCTTCTTCTC
TTTCTGCTTCTGTTGGTGATCGTGTTACTATTACTTGTCGTGCTTCTCAAGATGTTAATACTGCTGTTGCTTGGTATC
AACAAAAACCCGGTAAAGCTCCTAAACTTCTTATTTATTCTGCTTCTTTTCTTTATTCTGGTGTTCCTTCTCGTTTTT
CTGGTTCTCGTTCTGGTACTGATTTTACTCTTACTATTTCTTCTCTTCAACCTGAAGATTTTGCTACTTATTATTGTC
AACAACATTATACTACTCCTCCTACTTTTGGTCAAGGTACCAAGGTGGAGATCAAACGTACGCATCATCACCATCACC
AT
SEQID NO. 311
ATGCCACCTCCTCGCCTCCTCTTCTTCCTCCTCTTCCTCACCCCCATGGAAGTCAGGCCCGAGGAACCTCTAGTGGTG
AAGGTGGAAGAGGGAGATAACGCTGTGCTGCAGTGCCTCAAGGGGACCTCAGATGGCCCCACTCAGCAGCTGACCTGG
TCTCGGGAGTCCCCGCTTAAACCCTTCTTAAAACTCAGCCTGGGGCTGCCAGGCCTGGGAATCCACATGAGGCCCCTG
GCCATCTGGCTTTTCATCTTCAACGTCTCTCAACAGATGGGGGGCTTCTACCTGTGCCAGCCGGGGCCCCCCTCTGAG
AAGGCCTGGCAGCCTGGCTGGACAGTCAATGTGGAGGGCAGCGGGGAGCTGTTCCGGTGGAATGTTTCGGACCTAGGT
GGCCTGGGCTGTGGCCTGAAGAACAGGTCCTCAGAGGGCCCCAGCTCCCCTTCCGGGAAGCTCATGAGCCCCAAGCTG
TATGTGTGGGCCAAAGACCGCCCTGAGATCTGGGAGGGAGAGCCTCCGTGTCTCCCACCGAGGGACAGCCTGAACCAG
AGCCTCAGCCAGGACCTCACCATGGCCCCTGGCTCCACACTCTGGCTGTCCTGTGGGGTACCCCCTGACTCTGTGTCC
AGGGGCCCCCTCTCCTGGACCCATGTGCACCCCAAGGGGCCTAAGTCATTGCTGAGCCTAGAGCTGAAGGACGATCGC
CCGGCCAGAGATATGTGGGTAATGGAGACGGGTCTGTTGTTGCCCCGGGCCACAGCTCAAGACGCTGGAAAGTATTAT
TGTCACCGTGGCAACCTGACCATGTCATTCCACCTGGAGATCACTGCTCGGCCAGGGGGAGGTGGGTCTGGAGGTGGA
GGATCTGGTGGAGGTGGGTCTGGTGGAGGTGGGTCTGAGGTGCAGCTGGTGGAGTCTGGTGGTGGTCTTGTTCAACCT
GGTGGTTCTCTTCGTCTTTCTTGTGCTGCTTCTGGTTTTAATATTAAAGATACTTATATTCATTGGGTTCGTCAAGCT
CCTGGTAAAGGTCTTGAATGGGTTGCTCGTATTTATCCTACTAATGGTTATACTCGTTATGCTGATTCTGTTAAAGGT
CGTTTTACTATTTCTGCTGATACTTCTAAAAATACTGCTTATCTTCAAATGAACTCTCTTCGTGCTGAAGATACTGCT
GTTTATTATTGTTCTCGTTGGGGTGGTGATGGTTTTTATGCTATGGATTATTGGGGTCAAGGTACTCTTGTCACCGTC
TCCTCAGCTAGCACCGGGGGAGGTGGGTCTGGAGGTGGAGGATCTGGTGGAGGTGGGTCTGACATCCAGATGACCCAG
TCTCCTTCTTCTCTTTCTGCTTCTGTTGGTGATCGTGTTACTATTACTTGTCGTGCTTCTCAAGATGTTAATACTGCT
GTTGCTTGGTATCAACAAAAACCTGGTAAAGCTCCTAAACTTCTTATTTATTCTGCTTCTTTTCTTTATTCTGGTGTT
CCTTCTCGTTTTTCTGGTTCTCGTTCTGGTACTGATTTTACTCTTACTATTTCTTCTCTTCAACCTGAAGATTTTGCT
ACTTATTATTGTCAACAACATTATACTACTCCTCCTACTTTTGGTCAAGGTACCAAGGTGGAGATCAAACGTACGCAC
CACCATCACCACCAT
SEQID NO. 312
ATGCCACCTCCTCGCCTCCTCTTCTTCCTCCTCTTCCTCACCCCCATGGAAGTCAGGCCCGAGGAACCTCTAGTGGTG
AAGGTGGAAGAGGGAGATAACGCTGTGCTGCAGTGCCTCAAGGGGACCTCAGATGGCCCCACTCAGCAGCTGACCTGG
TCTCGGGAGTCCCCGCTTAAACCCTTCTTAAAACTCAGCCTGGGGCTGCCAGGCCTGGGAATCCACATGAGGCCCCTG
GCCATCTGGCTTTTCATCTTCAACGTCTCTCAACAGATGGGGGGCTTCTACCTGTGCCAGCCGGGGCCCCCCTCTGAG
AAGGCCTGGCAGCCTGGCTGGACAGTCAATGTGGAGGGCAGCGGGGAGCTGTTCCGGTGGAATGTTTCGGACCTAGGT
GGCCTGGGCTGTGGCCTGAAGAACAGGTCCTCAGAGGGCCCCAGCTCCCCTTCCGGGAAGCTCATGAGCCCCAAGCTG
TATGTGTGGGCCAAAGACCGCCCTGAGATCTGGGAGGGAGAGCCTCCGTGTCTCCCACCGAGGGACAGCCTGAACCAG
AGCCTCAGCCAGGACCTCACCATGGCCCCTGGCTCCACACTCTGGCTGTCCTGTGGGGTACCCCCTGACTCTGTGTCC
AGGGGCCCCCTCTCCTGGACCCATGTGCACCCCAAGGGGCCTAAGTCATTGCTGAGCCTAGAGCTGAAGGACGATCGC
CCGGCCAGAGATATGTGGGTAATGGAGACGGGTCTGTTGTTGCCCCGGGCCACAGCTCAAGACGCTGGAAAGTATTAT
TGTCACCGTGGCAACCTGACCATGTCATTCCACCTGGAGATCACTGCTCGGCCAGTACTATGGCACTGGCTGCTGAGG
ACTGGTGGCTGGAAG
SEQID NO. 313
ATGCTCAGGCTGCTCTTGGCTCTCAACTTATTCCCTTCAATTCAAGTAACAGGAGACATCCAGATGACACAGACTACA
TCCTCCCTGTCTGCCTCTCTGGGAGACAGAGTCACCATCAGTTGCAGGGCAAGTCAGGACATTAGTAAATATTTAAAT
TGGTATCAGCAGAAACCAGATGGAACTGTTAAACTCCTGATCTACCATACATCAAGATTACACTCAGGAGTCCCATCA
AGGTTCAGTGGCAGTGGGTCTGGAACAGATTATTCTCTCACCATTAGCAACCTGGAGCAAGAAGATATTGCCACTTAC
TTTTGCCAACAGGGTAATACGCTTCCGTACACGTTCGGAGGGGGGACTAAGTTGGAAATAACAGGAGGAGGTGGGTCT
GGAGGTGGAGGATCTGGTGGAGGTGGGTCTGGAGGAGGTGGGTCTGAGGTGAAACTGCAGGAGTCAGGACCTGGCCTG
GTGGCGCCCTCACAGAGCCTGTCCGTCACATGCACTGTCTCAGGGGTCTCATTACCCGACTATGGTGTAAGCTGGATT
CGCCAGCCTCCACGAAAGGGTCTGGAGTGGCTGGGAGTAATATGGGGTAGTGAAACCACATACTATAATTCAGCTCTC
AAATCCAGACTGACCATCATCAAGGACAACTCCAAGAGCCAAGTTTTCTTAAAAATGAACAGTCTGCAAACTGATGAC
ACAGCCATTTACTACTGTGCCAAACATTATTACTACGGTGGTAGCTATGCTATGGACTACTGGGGTCAAGGAACCTCA
GTCACCGTCTCCTCAGACTACAAAGACGATGACGACAAGATTGAAGTTATGTATCCTCCTCCTTACCTAGACAATGAG
AAGAGCAATGGAACCATTATCCATGTGAAAGGGAAACACCTTTGTCCAAGTCCCCTATTTCCCGGACCTTCTAAGCCC
TTTTGGGTGCTGGTGGTGGTTGGTGGAGTCCTGGCTTGCTATAGCTTGCTAGTAACAGTGGCCTTTATTATTTTCTGG
GTGAGGAGTAAGAGGAGCAGGCTCCTGCACAGTGACTACATGAACATGACTCCCCGCCGCCCCGGGCCCACCCGCAAG
CATTACCAGCCCTATGCCCCACCACGCGACTTCGCAGCCTATCGCTCCAAACGGGGCAGAAAGAAACTCCTGTATATA
TTCAAACAACCATTTATGAGACCAGTACAAACTACTCAAGAGGAAGATGGCTGTAGCTGCCGATTTCCAGAAGAAGAA
GAAGGAGGATGTGAACTGAGAGTGAAGTTCAGCAGGAGCGCAGACGCCCCCGCGTACCAGCAGGGCCAGAACCAGCTC
TATAACGAGCTCAATCTAGGACGAAGAGAGGAGTACGATGTTTTGGACAAGAGACGTGGCCGGGACCCTGAGATGGGG
GGAAAGCCGCAGAGAAGGAAGAACCCTCAGGAAGGCCTGTACAATGAACTGCAGAAAGATAAGATGGCGGAGGCCTAC
AGTGAGATTGGGATGAAAGGCGAGCGCCGGAGGGGCAAGGGGCACGATGGCCTTTACCAGGGTCTCAGTACAGCCACC
AAGGACACCTACGACGCCCTTCACATGCAGGCCCTGCCCCCTCGC
SEQID NO. 314
ATGCTCAGGCTGCTCTTGGCTCTCAACTTATTCCCTTCAATTCAAGTAACAGGAGACATCCAGATGACACAGACTACA
TCCTCCCTGTCTGCCTCTCTGGGAGACAGAGTCACCATCAGTTGCAGGGCAAGTCAGGACATTAGTAAATATTTAAAT
TGGTATCAGCAGAAACCAGATGGAACTGTTAAACTCCTGATCTACCATACATCAAGATTACACTCAGGAGTCCCATCA
AGGTTCAGTGGCAGTGGGTCTGGAACAGATTATTCTCTCACCATTAGCAACCTGGAGCAAGAAGATATTGCCACTTAC
TTTTGCCAACAGGGTAATACGCTTCCGTACACGTTCGGAGGGGGGACTAAGTTGGAAATAACAGGAGGAGGTGGGTCT
GGAGGTGGAGGATCTGGTGGAGGTGGGTCTGGAGGAGGTGGGTCTGAGGTGAAACTGCAGGAGTCAGGACCTGGCCTG
GTGGCGCCCTCACAGAGCCTGTCCGTCACATGCACTGTCTCAGGGGTCTCATTACCCGACTATGGTGTAAGCTGGATT
CGCCAGCCTCCACGAAAGGGTCTGGAGTGGCTGGGAGTAATATGGGGTAGTGAAACCACATACTATAATTCAGCTCTC
AAATCCAGACTGACCATCATCAAGGACAACTCCAAGAGCCAAGTTTTCTTAAAAATGAACAGTCTGCAAACTGATGAC
ACAGCCATTTACTACTGTGCCAAACATTATTACTACGGTGGTAGCTATGCTATGGACTACTGGGGTCAAGGAACCTCA
GTCACCGTCTCCTCAATTGAAGTTATGTATCCTCCTCCTTACCTAGACAATGAGAAGAGCAATGGAACCATTATCCAT
GTGAAAGGGAAACACCTTTGTCCAAGTCCCCTATTTCCCGGACCTTCTAAGCCCTTTTGGGTGCTGGTGGTGGTTGGT
GGAGTCCTGGCTTGCTATAGCTTGCTAGTAACAGTGGCCTTTATTATTTTCTGGGTGAGGAGTAAGAGGAGCAGGCTC
CTGCACAGTGACTACATGAACATGACTCCCCGCCGCCCCGGGCCCACCCGCAAGCATTACCAGCCCTATGCCCCACCA
CGCGACTTCGCAGCCTATCGCTCCAAACGGGGCAGAAAGAAACTCCTGTATATATTCAAACAACCATTTATGAGACCA
GTACAAACTACTCAAGAGGAAGATGGCTGTAGCTGCCGATTTCCAGAAGAAGAAGAAGGAGGATGTGAACTGAGAGTG
AAGTTCAGCAGGAGCGCAGACGCCCCCGCGTACCAGCAGGGCCAGAACCAGCTCTATAACGAGCTCAATCTAGGACGA
AGAGAGGAGTACGATGTTTTGGACAAGAGACGTGGCCGGGACCCTGAGATGGGGGGAAAGCCGCAGAGAAGGAAGAAC
CCTCAGGAAGGCCTGTACAATGAACTGCAGAAAGATAAGATGGCGGAGGCCTACAGTGAGATTGGGATGAAAGGCGAG
CGCCGGAGGGGCAAGGGGCACGATGGCCTTTACCAGGGTCTCAGTACAGCCACCAAGGACACCTACGACGCCCTTCAC
ATGCAGGCCCTGCCCCCTCGC
SEQID NO. 315
ATGGAGAAGGACACCCTGCTGCTGTGGGTGCTGCTGCTGTGGGTGCCCGGCAGCACCGGCGAGGTGAAGCTGGTGGAG
AGCGGCGGCGGCCTGGTGCAGCCCGGCGGCAGCCTGAAGCTGAGCTGCGCCGCCAGCGGCTTCGACTTCAGCAGGTAC
TGGATGAGCTGGGTGAGGCAGGCCCCCGGCAAGGGCCTGGAGTGGATCGGCGAGATCAACCTGGACAGCAGCACCATC
AACTACACCCCCAGCCTGAAGGACAAGTTCATCATCAGCAGGGACAACGCCAAGAACACCCTGTACCTGCAGATGAGC
AAGGTGAGGAGCGAGGACACCGCCCTGTACTACTGCGCCAGGAGGTACGACGCCATGGACTACTGGGGCCAGGGCACC
AGCGTGACCGTGAGCAGCGCCAAGACCACCGCCCCCAGCGTGTACCCCCTGGCCCCCGTGTGCGGCGACACCACCGGC
AGCAGCGTGACCCTGGGCTGCCTGGTGAAGGGCTACTTCCCCGAGCCCGTGACCCTGACCTGGAACAGCGGCAGCCTG
AGCAGCGGCGTGCACACCTTCCCCGCCGTGCTGCAGAGCGACCTGTACACCCTGAGCAGCAGCGTGACCGTGACCAGC
AGCACCTGGCCCAGCCAGAGCATCACCTGCAACGTGGCCCACCCCGCCAGCAGCACCAAGGTGGACAAGAAGATCGAG
CCCAGGGGCCCCACCATCAAGCCCTGCCCCCCCTGCAAGTGCCCCGCCCCCAACCTGCTGGGCGGCCCCAGCGTGTTC
ATCTTCCCCCCCAAGATCAAGGACGTGCTGATGATCAGCCTGAGCCCCATCGTGACCTGCGTGGTGGTGGACGTGAGC
GAGGACGACCCCGACGTGCAGATCAGCTGGTTCGTGAACAACGTGGAGGTGCACACCGCCCAGACCCAGACCCACAGG
GAGGACTACAACAGCACCCTGAGGGTGGTGAGCGCCCTGCCCATCCAGCACCAGGACTGGATGAGCGGCAAGGAGTTC
AAGTGCAAGGTGAACAACAAGGACCTGCCCGCCCCCATCGAGAGGACCATCAGCAAGCCCAAGGGCAGCGTGAGGGCC
CCCCAGGTGTACGTGCTGCCCCCCCCCGAGGAGGAGATGACCAAGAAGCAGGTGACCCTGACCTGCATGGTGACCGAC
TTCATGCCCGAGGACATCTACGTGGAGTGGACCAACAACGGCAAGACCGAGCTGAACTACAAGAACACCGAGCCCGTG
CTGGACAGCGACGGCAGCTACTTCATGTACAGCAAGCTGAGGGTGGAGAAGAAGAACTGGGTGGAGAGGAACAGCTAC
AGCTGCAGCGTGGTGCACGAGGGCCTGCACAACCACCACACCACCAAGAGCTTCAGCAGGACCCCCGGCAAG
SEQID NO. 316
ATGGACTTCGGCCTGATCTTCTTCATCGTGGCCCTGCTGAAGGGCGTGCAGTGCGACATCGTGCTGACCCAGAGCCCC
GCCAGCCTGGCCGTGAGCCTGGGCCAGAGGGCCACCATCAGCTGCAGGGCCAGCGAGAGCGTGGACGACTACGGCATC
AGCTTCATGAACTGGTTCCAGCAGAAGCCCGGCCAGCCCCCCAAGCTGCTGATCTACGCCGCCCCCAACCAGGGCAGC
GGCGTGCCCGCCAGGTTCAGCGGCAGCGGCAGCGGCACCGACTTCAGCCTGAACATCCACCCCATGGAGGAGGACGAC
ACCGCCATGTACTTCTGCCAGCAGAGCAAGGACGTGAGGTGGACCTTCGGCGGCGGCACCAAGCTGGAGATCAAGAGG
GCCGACGCCGCCCCCACCGTGAGCATCTTCCCCCCCAGCAGCGAGCAGCTGACCAGCGGCGGCGCCAGCGTGGTGTGC
TTCCTGAACAACTTCTACCCCAAGGACATCAACGTGAAGTGGAAGATCGACGGCAGCGAGAGGCAGAACGGCGTGCTG
AACAGCTGGACCGACCAGGACAGCAAGGACAGCACCTACAGCATGAGCAGCACCCTGACCCTGACCAAGGACGAGTAC
GAGAGGCACAACAGCTACACCTGCGAGGCCACCCACAAGACCAGCACCAGCCCCATCGTGAAGAGCTTCAACAGGAAC
GAGTGC
SEQID NO. 317
ATGGAGAAGGACACCCTGCTGCTGTGGGTGCTGCTGCTGTGGGTGCCCGGCAGCACCGGCGAGGTGAAGCTGGTGGAG
AGCGGCGGCGGCCTGGTGCAGCCCGGCGGCAGCCTGAAGCTGAGCTGCGCCGCCAGCGGCTTCGACTTCAGCAGGTAC
TGGATGAGCTGGGTGAGGCAGGCCCCCGGCAAGGGCCTGGAGTGGATCGGCGAGATCAACCTGGACAGCAGCACCATC
AACTACACCCCCAGCCTGAAGGACAAGTTCATCATCAGCAGGGACAACGCCAAGAACACCCTGTACCTGCAGATGAGC
AAGGTGAGGAGCGAGGACACCGCCCTGTACTACTGCGCCAGGAGGTACGACGCCATGGACTACTGGGGCCAGGGCACC
AGCGTGACCGTGAGCAGCGCCAGCACCGGCGGCGGCGGCAGCGGCGGCGGCGGCAGCGGCGGCGGCGGCAGCGGCGGC
GGCGGCAGCGACATCGTGCTGACCCAGAGCCCCGCCAGCCTGGCCGTGAGCCAGGGCCAGAGGGCCACCATCAGCTGC
AGGGCCAGCGAGAGCGTGGACGACTACGGCATCAGCTTCATGAACTGGTTCCAGCAGAAGCCCGGCCAGCCCCCCAAG
CTGCTGATCTACGCCGCCCCCAACCAGGGCAGCGGCGTGCCCGCCAGGTTCAGCGGCAGCGGCAGCGGCACCGACTTC
AGCCTGAACATCCACCCCATGGAGGAGGACGACACCGCCACCTACTTCTGCCAGCAGAGCAAGGACGTGAGGTGGACC
TTCGGCGGCGGCACCAAGCTGGAGATCAAGAGGGGAGGAGGTGGGTCTGGAGGTGGAGGATCTGGTGGAGGTGGGTCT
GGAGGAGGTGGGTCTGAGGTGCAGCTGGTGGAGTCTGGTGGTGGTCTTGTTCAACCTGGTGGTTCTCTTCGTCTTTCT
TGTGCTGCTTCTGGTTTTAATATTAAAGATACTTATATTCATTGGGTTCGTCAAGCTCCTGGTAAAGGTCTTGAATGG
GTTGCTCGTATTTATCCTACTAATGGTTATACTCGTTATGCTGATTCTGTTAAAGGTCGTTTTACTATTTCTGCTGAT
ACTTCTAAAAATACTGCTTATCTTCAAATGAACTCTCTTCGTGCTGAAGATACTGCTGTTTATTATTGTTCTCGTTGG
GGTGGTGATGGTTTTTATGCTATGGATTATTGGGGTCAAGGTACTCTTGTCACCGTCTCCTCAGCTAGCACCGGGGGA
GGTGGGTCTGGAGGTGGAGGATCTGGTGGAGGTGGGTCTGACATCCAGATGACCCAGTCTCCTTCTTCTCTTTCTGCT
TCTGTTGGTGATCGTGTTACTATTACTTGTCGTGCTTCTCAAGATGTTAATACTGCTGTTGCTTGGTATCAACAAAAA
CCTGGTAAAGCTCCTAAACTTCTTATTTATTCTGCTTCTTTTCTTTATTCTGGTGTTCCTTCTCGTTTTTCTGGTTCT
CGTTCTGGTACTGATTTTACTCTTACTATTTCTTCTCTTCAACCTGAAGATTTTGCTACTTATTATTGTCAACAACAT
TATACTACTCCTCCTACTTTTGGTCAAGGTACCAAGGTGGAGATCAAACGTACGTCTAGAGGGCCCCATCATCACCAT
CACCAT
SEQID NO. 318
ATGGACTTCGGCCTGATCTTCTTCATCGTGGCCCTGCTGAAGGGCGTGCAGTGCGACATCGTGCTGACCCAGAGCCCC
GCCAGCCTGGCCGTGAGCCAGGGCCAGAGGGCCACCATCAGCTGCAGGGCCAGCGAGAGCGTGGACGACTACGGCATC
AGCTTCATGAACTGGTTCCAGCAGAAGCCCGGCCAGCCCCCCAAGCTGCTGATCTACGCCGCCCCCAACCAGGGCAGC
GGCGTGCCCGCCAGGTTCAGCGGCAGCGGCAGCGGCACCGACTTCAGCCTGAACATCCACCCCATGGAGGAGGACGAC
ACCGCCACCTACTTCTGCCAGCAGAGCAAGGACGTGAGGTGGACCTTCGGCGGCGGCACCAAGCTGGAGATCAAGAGG
GGCGGCGGCGGCAGCGGCGGCGGCGGCAGCGGCGGCGGCGGCAGCGGCGGCGGCGGCAGCGAGGTGAAGCTGGTGGAG
AGCGGCGGCGGCCTGGTGCAGCCCGGCGGCAGCCTGAAGCTGAGCTGCGCCGCCAGCGGCTTCGACTTCAGCAGGTAC
TGGATGAGCTGGGTGAGGCAGGCCCCCGGCAAGGGCCTGGAGTGGATCGGCGAGATCAACCTGGACAGCAGCACCATC
AACTACACCCCCAGCCTGAAGGACAAGTTCATCATCAGCAGGGACAACGCCAAGAACACCCTGTACCTGCAGATGAGC
AAGGTGAGGAGCGAGGACACCGCCCTGTACTACTGCGCCAGGAGGTACGACGCCATGGACTACTGGGGCCAGGGCACC
AGCGTGACCGTGAGCAGCGGAGGAGGTGGGTCTGGAGGTGGAGGATCTGGTGGAGGTGGGTCTGGAGGAGGTGGGTCT
GAGGTGCAGCTGGTGGAGTCTGGTGGTGGTCTTGTTCAACCTGGTGGTTCTCTTCGTCTTTCTTGTGCTGCTTCTGGT
TTTAATATTAAAGATACTTATATTCATTGGGTTCGTCAAGCTCCTGGTAAAGGTCTTGAATGGGTTGCTCGTATTTAT
CCTACTAATGGTTATACTCGTTATGCTGATTCTGTTAAAGGTCGTTTTACTATTTCTGCTGATACTTCTAAAAATACT
GCTTATCTTCAAATGAACTCTCTTCGTGCTGAAGATACTGCTGTTTATTATTGTTCTCGTTGGGGTGGTGATGGTTTT
TATGCTATGGATTATTGGGGTCAAGGTACTCTTGTCACCGTCTCCTCAGCTAGCACCGGGGGAGGTGGGTCTGGAGGT
GGAGGATCTGGTGGAGGTGGGTCTGACATCCAGATGACCCAGTCTCCTTCTTCTCTTTCTGCTTCTGTTGGTGATCGT
GTTACTATTACTTGTCGTGCTTCTCAAGATGTTAATACTGCTGTTGCTTGGTATCAACAAAAACCTGGTAAAGCTCCT
AAACTTCTTATTTATTCTGCTTCTTTTCTTTATTCTGGTGTTCCTTCTCGTTTTTCTGGTTCTCGTTCTGGTACTGAT
TTTACTCTTACTATTTCTTCTCTTCAACCTGAAGATTTTGCTACTTATTATTGTCAACAACATTATACTACTCCTCCT
ACTTTTGGTCAAGGTACCAAGGTGGAGATCAAACGTACGTCTAGAGGGCCCCATCATCACCATCACCAT

The application's sequence listing, which the Patent Office published only in electronic form, follows.

SEQUENCE LISTING (321 sequences)

SEQ ID NO: 1 - protein, 463 aa, Artificial Sequence
  Description of Artificial Sequence: Synthetic polypeptide
MEFGLSWVFLVALFRGVQCQVQLQESGPGLVKPSETLSLTCTVSGGSVSSGDYYWTWIRQSPGKGLEWIGHIYYSGNTNYNPSLKSRLTISIDTSKTQFSLKLSSVTAADTAIYYCVRDRVTGAFDIWGQGTMVTVSSASTKGPSVFPLAPCSRSTSESTAALGCLVKDYFPEPVTVSWNSGALTSGVHTFPAVLQSSGLYSLSSVVTVPSSNFGTQTYTCNVDHKPSNTKVDKTVERKCCVECPPCPAPPVAGPSVFLFPPKPKDTLMISRTPEVTCVVVDVSHEDPEVQFNWYVDGVEVHNAKTKPREEQFQSTFRVVSVLTVVHQDWLNGKEYKCKVSNKGLPAPIEKTISKTKGQPREPQVYTLPPSREEMTKNQVSLTCLVKGFYPSDIAVEWESNGQPENNYKTTPPMLDSDGSFFLYSKLTVDKSRWQQGNVFSCSVMHEALHNHYTQKSLSLSPG

SEQ ID NO: 2 - protein, 347 aa, Artificial Sequence
  Description of Artificial Sequence: Synthetic polypeptide
MPPPRLLFFLLFLTPMEVRPEEPLVVKVEEGDNAVLQCLKGTSDGPTQQLTWSRESPLKPFLKLSLGLPGLGIHMRPLAIWLFIFNVSQQMGGFYLCQPGPPSEKAWQPGWTVNVEGSGGGGSGGGGSGGGGSDIQMTQSPSSLSASVGDRVTITCQASQDISNYLNWYQQKPGKAPKLLIYDASNLETGVPSRFSGSGSGTDFTFTISSLQPEDIATYFCQHFDHLPLAFGGGTKVEIKRTVAAPSVFIFPPSDEQLKSGTASVVCLLNNFYPREAKVQWKVDNALQSGNSQESVTEQDSKDSTYSLSSTLTLSKADYEKHKVYACEVTHQGLSSPVTKSFNRGEC

SEQ ID NO: 3 - protein, 577 aa, Artificial Sequence
  Description of Artificial Sequence: Synthetic polypeptide
MPPPRLLFFLLFLTPMEVRPEEPLVVKVEEGDNAVLQCLKGTSDGPTQQLTWSRESPLKPFLKLSLGLPGLGIHMRPLAIWLFIFNVSQQMGGFYLCQPGPPSEKAWQPGWTVNVEGSGGGGSGGGGSGGGGSQVQLQESGPGLVKPSETLSLTCTVSGGSVSSGDYYWTWIRQSPGKGLEWIGHIYYSGNTNYNPSLKSRLTISIDTSKTQFSLKLSSVTAADTAIYYCVRDRVTGAFDIWGQGTMVTVSSASTKGPSVFPLAPCSRSTSESTAALGCLVKDYFPEPVTVSWNSGALTSGVHTFPAVLQSSGLYSLSSVVTVPSSNFGTQTYTCNVDHKPSNTKVDKTVERKCCVECPPCPAPPVAGPSVFLFPPKPKDTLMISRTPEVTCVVVDVSHEDPEVQFNWYVDGVEVHNAKTKPREEQFQSTFRVVSVLTVVHQDWLNGKEYKCKVSNKGLPAPIEKTISKTKGQPREPQVYTLPPSREEMTKNQVSLTCLVKGFYPSDIAVEWESNGQPENNYKTTPPMLDSDGSFFLYSKLTVDKSRWQQGNVFSCSVMHEALHNHYTQKSLSLSPG

SEQ ID NO: 4 - protein, 234 aa, Artificial Sequence
  Description of Artificial Sequence: Synthetic polypeptide
METDTLLLWVLLLWVPGSTGDIQMTQSPSSLSASVGDRVTITCQASQDISNYLNWYQQKPGKAPKLLIYDASNLETGVPSRFSGSGSGTDFTFTISSLQPEDIATYFCQHFDHLPLAFGGGTKVEIKRTVAAPSVFIFPPSDEQLKSGTASVVCLLNNFYPREAKVQWKVDNALQSGNSQESVTEQDSKDSTYSLSSTLTLSKADYEKHKVYACEVTHQGLSSPVTKSFNRGEC

SEQ ID NO: 5 - protein, 356 aa, Artificial Sequence
  Description of Artificial Sequence: Synthetic polypeptide
METDTLLLWVLLLWVPGSTGDIQMTQSPSSLSASVGDRVTITCQASQDISNYLNWYQQKPGKAPKLLIYDASNLETGVPSRFSGSGSGTDFTFTISSLQPEDIATYFCQHFDHLPLAFGGGTKVEIKRTVAAPSVFIFPPSDEQLKSGTASVVCLLNNFYPREAKVQWKVDNALQSGNSQESVTEQDSKDSTYSLSSTLTLSKADYEKHKVYACEVTHQGLSSPVTKSFNRGECDKTHTSPPSPAPEAAGGPSEVRPEEPLVVKVEEGDNAVLQCLKGTSDGPTQQLTWSRESPLKPFLKLSLGLPGLGIHMRPLAIWLFIFNVSQQMGGFYLCQPGPPSEKAWQPGWTVNVEGSG

SEQ ID NO: 6 - protein, 581 aa, Artificial Sequence
  Description of Artificial Sequence: Synthetic polypeptide
MEFGLSWVFLVALFRGVQCQVQLQESGPGLVKPSETLSLTCTVSGGSVSSGDYYWTWIRQSPGKGLEWIGHIYYSGNTNYNPSLKSRLTISIDTSKTQFSLKLSSVTAADTAIYYCVRDRVTGAFDIWGQGTMVTVSSASTKGPSVFPLAPCSRSTSESTAALGCLVKDYFPEPVTVSWNSGALTSGVHTFPAVLQSSGLYSLSSVVTVPSSNFGTQTYTCNVDHKPSNTKVDKTVERKCCVECPPCPAPPVAGPSVFLFPPKPKDTLMISRTPEVTCVVVDVSHEDPEVQFNWYVDGVEVHNAKTKPREEQFQSTFRVVSVLTVVHQDWLNGKEYKCKVSNKGLPAPIEKTISKTKGQPREPQVYTLPPSREEMTKNQVSLTCLVKGFYPSDIAVEWESNGQPENNYKTTPPMLDSDGSFFLYSKLTVDKSRWQQGNVFSCSVMHEALHNHYTQKSLSLSPGGGGGSGGGGSGGGGSEVRPEEPLVVKVEEGDNAVLQCLKGTSDGPTQQLTWSRESPLKPFLKLSLGLPGLGIHMRPLAIWLFIFNVSQQMGGFYLCQPGPPSEKAWQPGWTVNVEGSG

SEQ ID NO: 7 - protein, 460 aa, Artificial Sequence
  Description of Artificial Sequence: Synthetic polypeptide
MEFGLSWVFLVALFRGVQCQVQLVQSGAEVKKPGASVKVSCKASGYTFTDYYMHWVRQAPGQGLEWMGRVNPNRRGTTYNQKFEGRVTMTTDTSTSTAYMELRSLRSDDTAVYYCARANWLDYWGQGTTVTVSSASTKGPSVFPLAPCSRSTSESTAALGCLVKDYFPEPVTVSWNSGALTSGVHTFPAVLQSSGLYSLSSVVTVPSSSLGTKTYTCNVDHKPSNTKVDKRVESKYGPPCPPCPAPEAAGGPSVFLFPPKPKDTLMISRTPEVTCVVVDVSQEDPEVQFNWYVDGVEVHNAKTKPREEQFNSTYRVVSVLTVLHQDWLNGKEYKCKVSNKGLPSSIEKTISKAKGQPREPQVYTLPPSQEEMTKNQVSLTCLVKGFYPSDIAVEWESNGQPENNYKTTPPVLDSDGSFFLYSRLTVDKSRWQEGNVFSCSVMHEALHNHYTQKSLSLSLG

SEQ ID NO: 8 - protein, 348 aa, Artificial Sequence
  Description of Artificial Sequence: Synthetic polypeptide
MPPPRLLFFLLFLTPMEVRPEEPLVVKVEEGDNAVLQCLKGTSDGPTQQLTWSRESPLKPFLKLSLGLPGLGIHMRPLAIWLFIFNVSQQMGGFYLCQPGPPSEKAWQPGWTVNVEGSGGGGSGGGGSGGGGSDIQMTQSPSSLSASVGDRVTITCSVSSSVSSIYLHWYQQKPGKAPKLLIYSTSNLASGVPSRFSGSGSGTDFTLTISSLQPEDFATYYCQVYSGYPLTFGGGTKVEIKRTVAAPSVFIFPPSDEQLKSGTASVVCLLNNFYPREAKVQWKVDNALQSGNSQESVTEQDSKDSTYSLSSTLTLSKADYEKHKVYACEVTHQGLSSPVTKSFNRGEC

SEQ ID NO: 9 - protein, 573 aa, Artificial Sequence
  Description of Artificial Sequence: Synthetic polypeptide
MPPPRLLFFLLFLTPMEVRPEEPLVVKVEEGDNAVLQCLKGTSDGPTQQLTWSRESPLKPFLKLSLGLPGLGIHMRPLAIWLFIFNVSQQMGGFYLCQPGPPSEKAWQPGWTVNVEGSGGGGSGGGGSGGGGSQVQLVQSGAEVKKPGASVKVSCKASGYTFTDYYMHWVRQAPGQGLEWMGRVNPNRRGTTYNQKFEGRVTMTTDTSTSTAYMELRSLRSDDTAVYYCARANWLDYWGQGTTVTVSSASTKGPSVFPLAPCSRSTSESTAALGCLVKDYFPEPVTVSWNSGALTSGVHTFPAVLQSSGLYSLSSVVTVPSSSLGTKTYTCNVDHKPSNTKVDKRVESKYGPPCPPCPAPEAAGGPSVFLFPPKPKDTLMISRTPEVTCVVVDVSQEDPEVQFNWYVDGVEVHNAKTKPREEQFNSTYRVVSVLTVLHQDWLNGKEYKCKVSNKGLPSSIEKTISKAKGQPREPQVYTLPPSQEEMTKNQVSLTCLVKGFYPSDIAVEWESNGQPENNYKTTPPVLDSDGSFFLYSRLTVDKSRWQEGNVFSCSVMHEALHNHYTQKSLSLSL

SEQ ID NO: 10 - protein, 235 aa, Artificial Sequence
  Description of Artificial Sequence: Synthetic polypeptide
METDTLLLWVLLLWVPGSTGDIQMTQSPSSLSASVGDRVTITCSVSSSVSSIYLHWYQQKPGKAPKLLIYSTSNLASGVPSRFSGSGSGTDFTLTISSLQPEDFATYYCQVYSGYPLTFGGGTKVEIKRTVAAPSVFIFPPSDEQLKSGTASVVCLLNNFYPREAKVQWKVDNALQSGNSQESVTEQDSKDSTYSLSSTLTLSKADYEKHKVYACEVTHQGLSSPVTKSFNRGEC

SEQ ID NO: 11 - protein, 357 aa, Artificial Sequence
  Description of Artificial Sequence: Synthetic polypeptide
METDTLLLWVLLLWVPGSTGDIQMTQSPSSLSASVGDRVTITCSVSSSVSSIYLHWYQQKPGKAPKLLIYSTSNLASGVPSRFSGSGSGTDFTLTISSLQPEDFATYYCQVYSGYPLTFGGGTKVEIKRTVAAPSVFIFPPSDEQLKSGTASVVCLLNNFYPREAKVQWKVDNALQSGNSQESVTEQDSKDSTYSLSSTLTLSKADYEKHKVYACEVTHQGLSSPVTKSFNRGECDKTHTSPPSPAPEAAGGPSEVRPEEPLVVKVEEGDNAVLQCLKGTSDGPTQQLTWSRESPLKPFLKLSLGLPGLGIHMRPLAIWLFIFNVSQQMGGFYLCQPGPPSEKAWQPGWTVNVEGSG

SEQ ID NO: 12 - protein, 578 aa, Artificial Sequence
  Description of Artificial Sequence: Synthetic polypeptide
MEFGLSWVFLVALFRGVQCQVQLVQSGAEVKKPGASVKVSCKASGYTFTDYYMHWVRQAPGQGLEWMGRVNPNRRGTTYNQKFEGRVTMTTDTSTSTAYMELRSLRSDDTAVYYCARANWLDYWGQGTTVTVSSASTKGPSVFPLAPCSRSTSESTAALGCLVKDYFPEPVTVSWNSGALTSGVHTFPAVLQSSGLYSLSSVVTVPSSSLGTKTYTCNVDHKPSNTKVDKRVESKYGPPCPPCPAPEAAGGPSVFLFPPKPKDTLMISRTPEVTCVVVDVSQEDPEVQFNWYVDGVEVHNAKTKPREEQFNSTYRVVSVLTVLHQDWLNGKEYKCKVSNKGLPSSIEKTISKAKGQPREPQVYTLPPSQEEMTKNQVSLTCLVKGFYPSDIAVEWESNGQPENNYKTTPPVLDSDGSFFLYSRLTVDKSRWQEGNVFSCSVMHEALHNHYTQKSLSLSLGGGGGSGGGGSGGGGSEVRPEEPLVVKVEEGDNAVLQCLKGTSDGPTQQLTWSRESPLKPFLKLSLGLPGLGIHMRPLAIWLFIFNVSQQMGGFYLCQPGPPSEKAWQPGWTVNVEGSG

SEQ ID NO: 13 - protein, 646 aa, Artificial Sequence
  Description of Artificial Sequence: Synthetic polypeptide
METDTLLLWVLLLWVPGSTGDIQMTQTTSSLSASLGDRVTISCRASQDISKYLNWYQQKPDGTVKLLIYHTSRLHSGVPSRFSGSGSGTDYSLTISNLEQEDIATYFCQQGNTLPYTFGGGTKLEITGGGGSGGGGSGGGGSGGGGSEVKLQESGPGLVAPSQSLSVTCTVSGVSLPDYGVSWIRQPPRKGLEWLGVIWGSETTYYNSALKSRLTIIKDNSKSQVFLKMNSLQTDDTAIYYCAKHYYYGGSYAMDYWGQGTSVTVSSPSQFRVSPLDRTWNLGETVELKCQVLLSNPTSGCSWLFQPRGAAASPTFLLYLSQNKPKAAEGLDTQRFSGKRLGDTFVLTLSDFRRENEGYYFCSALSNSIMYFSHFVPVFLPAKPTTTPAPRPPTPAPTIASQPLSLRPEACRPAAGGAVHTRGLDFACDIYIWAPLAGTCGVLLLSLVITRSKRSRLLHSDYMNMTPRRPGPTRKHYQPYAPPRDFAAYRSKRGRKKLLYIFKQPFMRPVQTTQEEDGCSCRFPEEEEGGCELRVKFSRSADAPAYQQGQNQLYNELNLGRREEYDVLDKRRGRDPEMGGKPQRRKNPQEGLYNELQKDKMAEAYSEIGMKGERRRGKGHDGLYQGLSTATKDTYDALHMQALPPR

SEQ ID NO: 14 - protein, 125 aa, Artificial Sequence
  Description of Artificial Sequence: Synthetic polypeptide
MPPPRLLFFLLFLTPMEVRPEEPLVVKVEEGDNAVLQCLKGTSDGPTQQLTWSRESPLKPFLKLSLGLPGLGIHMRPLAIWLFIFNVSQQMGGFYLCQPGPPSEKAWQPGWTVNVEGSGHHHHHH

SEQ ID NO: 15 - protein, 345 aa, Artificial Sequence
  Description of Artificial Sequence: Synthetic polypeptide
MPPPRLLFFLLFLTPMEVRPEEPLVVKVEEGDNAVLQCLKGTSDGPTQQLTWSRESPLKPFLKLSLGLPGLGIHMRPLAIWLFIFNVSQQMGGFYLCQPGPPSEKAWQPGWTVNVEGSGDKTHTCPPCPAPELLGGPSVFLFPPKPKDTLMISRTPEVTCVVVDVSHEDPEVKFNWYVDGVEVHNAKTKPREEQYNSTYRVVSVLTVLHQDWLNGKEYKCKVSNKALPAPIEKTISKAKGQPREPQVYTLPPSREEMTKNQVSLTCLVKGFYPSDIAVEWESNGQPENNYKTTPPVLDSDGSFFLYSKLTVDKSRWQQGNVFSCSVMHEALHNHYTQKSLSLSPG

SEQ ID NO: 16 - protein, 274 aa, Artificial Sequence
  Description of Artificial Sequence: Synthetic polypeptide
MEFGLSWVFLVALFRGVQCEVQLVESGGGLVQPGGSLRLSCAASGFNIKDTYIHWVRQAPGKGLEWVARIYPTNGYTRYADSVKGRFTISADTSKNTAYLQMNSLRAEDTAVYYCSRWGGDGFYAMDYWGQGTLVTVSSASTGGGGSGGGGSGGGGSDIQMTQSPSSLSASVGDRVTITCRASQDVNTAVAWYQQKPGKAPKLLIYSASFLYSGVPSRFSGSRSGTDFTLTISSLQPEDFATYYCQQHYTTPPTFGQGTKVEIKRTGPHHHHHH

SEQ ID NO: 17 - protein, 280 aa, Artificial Sequence
  Description of Artificial Sequence: Synthetic polypeptide
MEFGLSWVFLVALFRGVQCQVQLVQSGAEDKKPGESVKISCKASGYTFTNYGMNWVRQAPGQGLKWMGWINTYTGESTYADDFKGRFAFSLDTSASTAYLQLSSLRGEDTAVYFCARFAIKGDYWGQGTTVTVSSASTGGGGSGGGGSGGGGSGGGGSDIVMTQSPLSLEVSPGEPASISCRSTKSLLHSDGITYLYWYLQKPGQSPQLLIYQLSNLASGVPDRFSSSGSGTDFTLKISRVEAEDEGTYYCAQNLEIPRTFGQGTKLEIKRTGPHHHHHH

SEQ ID NO: 18 - protein, 278 aa, Artificial Sequence
  Description of Artificial Sequence: Synthetic polypeptide
METDTLLLWVLLLWVPGSTGDIVMTQSPLSLPVTPGEPASISCRSTKSLLHSDGITYLYWYLQKPGQSPQLLIYQLSNLASGVPDRFSSSGSGTDFTLKISRVEAEDEGVYYCAQNLEIPRTFGCGTKLEIKRTGGGGSGGGGSGGGGSGGGGSQVQLVQSGAEVKKPGESVKISCKASGYTFTNYGMNWVRQAPGQCLKWMGWINTYTGESTYADDFKGRFAFSLDTSASTAYLQLSSLRSEDTAVYFCARFAIKGDYWGQGTLVTVSSGPHHHHHH

SEQ ID NO: 19 - protein, 275 aa, Artificial Sequence
  Description of Artificial Sequence: Synthetic polypeptide
MEFGLSWVFLVALFRGVQCQVQLVQSGAEDVKPDASVKLSCKASGYTFTDYYMHWVRQAPGQGLEWMGRVNPNRRGTTYNQKFEGRVTMTTDTSTSTAYMQLSSLRGEDTAVYYCARANWLDYWGQGTTVTVSSASTGGGGSGGGGSGGGGSGGGGSDIQMTQSPSSLEASVGDRVTITCSVSSSVSSIYLHWYQQKPGKSPKLLIYSTSNLASGVPDRFSGSGSGTDFTLTISSLQAEDEGTYYCQVYSGYPLTFGGGTKLEIKRTGPHHHHHH

SEQ ID NO: 20 - protein, 273 aa, Artificial Sequence
  Description of Artificial Sequence: Synthetic polypeptide
METDTLLLWVLLLWVPGSTGDIQMTQSPSSLSASVGDRVTITCSVSSSVSSIYLHWYQQKPGKAPKLLIYSTSNLASGVPSRFSGSGSGTDFTLTISSLQPEDEATYYCQVYSGYPLTFGCGTKVEIKRTGGGGSGGGGSGGGGSGGGGSQVQLVQSGAEDKKPGASVKVSCKASGYTFTDYYMHWVRQAPGQCLEWMGRVNPNRRGTTYNQKFEGRVTMTTDTSTSTAYMELRSLRSDDTAVYYCARANWLDYWGQGTTVTVSSGPHHHHHH

SEQ ID NO: 21 - protein, 278 aa, Artificial Sequence
  Description of Artificial Sequence: Synthetic polypeptide
MEFGLSWVFLVALFRGVQCQVQLQESGPGDVKPSETLSLTCTVSGGSVSSGDYYWTWIRQSPGKGLEWIGHIYYSGNTNYNPSLKSRLTISIDTSKTTFSLQLSSVTGEDTAIYYCVRDRVTGAFDIWGQGTTVTVSSASTGGGGSGGGGSGGGGSGGGGSDIQMTQSPSSLEASVGDRVTITCQASQDISNYLNWYQQKPGKSPKLLIYDASNLETGVPDRFSGSGSGTDFTFTISSLQAEDEGTYFCQHFDHLPLAFGGGTKLEIKRTGPHHHHHH

SEQ ID NO: 22 - protein, 276 aa, Artificial Sequence
  Description of Artificial Sequence: Synthetic polypeptide
METDTLLLWVLLLWVPGSTGDIQMTQSPSSLSASVGDRVTITCQASQDISNYLNWYQQKPGKAPKLLIYDASNLETGVPSRFSGSGSGTDFTFTISSLQPEDEATYFCQHFDHLPLAFGCGTKVEIKRTGGGGSGGGGSGGGGSGGGGSQVQLQESGPGDVKPSETLSLTCTVSGGSVSSGDYYWTWIRQSPGKCLEWIGHIYYSGNTNYNPSLKSRLTISIDTSKTQFSLKLSSVTAADTAIYYCVRDRVTGAFDIWGQGTTVTVSSGPHHHHHH

SEQ ID NO: 23 - protein, 456 aa, Artificial Sequence
  Description of Artificial Sequence: Synthetic polypeptide
MPPPRLLFFLLFLTPMEVRHHHHHHPEEPLVVKVEEGDNAVLQCLKGTSDGPTQQLTWSRESPLKPFLKLSLGLPGLGIHMRPLAIWLFIFNVSQQMGGFYLCQPGPPSEKAWQPGWTVNVEGSGELFRWNVSDLGGLGCGLKNRSSEGPSSPSGKLMSPKLYVWAKDRPEIWEGEPPCLPPRDSLNQSLSQDLTMAPGSTLWLSCGVPPDSVSRGPLSWTHVHPKGPKSLLSLELKDDRPARDMWVMETGLLLPRATAQDAGKYYCHRGNLTMSFHLEITARPGGGGSGGGGSGGGGSVRSSSRTPSDKPVAHVVANPQAEGQLQWLNRRANALLANGVELRDNQLVVPSEGLYLIYSQVLFKGQGCPSTHVLLTHTISRIAVSYQTKVNLLSAIKSPCQRETPEGAEAKPWYEPIYLGGVFQLEKGDRLSAEINRPDYLDFAESGQVYFGIIAL

SEQ ID NO: 24 - protein, 398 aa, Artificial Sequence
  Description of Artificial Sequence: Synthetic polypeptide
MEFGLSWVFLVALFRGVQCEVQLVESGGGLVQPGGSLRLSCAASGFNIKDTYIHWVRQAPGKGLEWVARIYPTNGYTRYADSVKGRFTISADTSKNTAYLQMNSLRAEDTAVYYCSRWGGDGFYAMDYWGQGTLVTVSSASTGGGGSGGGGSGGGGSDIQMTQSPSSLSASVGDRVTITCRASQDVNTAVAWYQQKPGKAPKLLIYSASFLYSGVPSRFSGSRSGTDFTLTISSLQPEDFATYYCQQHYTTPPTFGQGTKVEIKRTDKTHTSPPSPAPEAAGGPSEVRPEEPLVVKVEEGDNAVLQCLKGTSDGPTQQLTWSRESPLKPFLKLSLGLPGLGIHMRPLAIWLFIFNVSQQMGGFYLCQPGPPSEKAWQPGWTVNVEGSGSRGPHHHHHH

SEQ ID NO: 25 - protein, 614 aa, Artificial Sequence
  Description of Artificial Sequence: Synthetic polypeptide
MEFGLSWVFLVALFRGVQCEVQLVESGGGLVQPGGSLRLSCAASGFNIKDTYIHWVRQAPGKGLEWVARIYPTNGYTRYADSVKGRFTISADTSKNTAYLQMNSLRAEDTAVYYCSRWGGDGFYAMDYWGQGTLVTVSSASTGGGGSGGGGSGGGGSDIQMTQSPSSLSASVGDRVTITCRASQDVNTAVAWYQQKPGKAPKLLIYSASFLYSGVPSRFSGSRSGTDFTLTISSLQPEDFATYYCQQHYTTPPTFGQGTKVEIKRTDKTHTSPPSPAPEAAGGPSEVRPEEPLVVKVEEGDNAVLQCLKGTSDGPTQQLTWSRESPLKPFLKLSLGLPGLGIHMRPLAIWLFIFNVSQQMGGFYLCQPGPPSEKAWQPGWTVNVEGSGDKTHTCPPCPAPELLGGPSVFLFPPKPKDTLMISRTPEVTCVVVDVSHEDPEVKFNWYVDGVEVHNAKTKPREEQYNSTYRVVSVLTVLHQDWLNGKEYKCKVSNKALPAPIEKTISKAKGQPREPQVYTLPPSREEMTKNQVSLTCLVKGFYPSDIAVEWESNGQPENNYKTTPPVLDSDGSFFLYSKLTVDKSRWQQGNVFSCSVMHEALHNHYTQKSLSLSPG

SEQ ID NO: 26 - protein, 396 aa, Artificial Sequence
  Description of Artificial Sequence: Synthetic polypeptide
MPPPRLLFFLLFLTPMEVRPEEPLVVKVEEGDNAVLQCLKGTSDGPTQQLTWSRESPLKPFLKLSLGLPGLGIHMRPLAIWLFIFNVSQQMGGFYLCQPGPPSEKAWQPGWTVNVEGSGGGGGSGGGGSGGGGSGGGGSEVQLVESGGGLVQPGGSLRLSCAASGFNIKDTYIHWVRQAPGKGLEWVARIYPTNGYTRYADSVKGRFTISADTSKNTAYLQMNSLRAEDTAVYYCSRWGGDGFYAMDYWGQGTLVTVSSASTGGGGSGGGGSGGGGSDIQMTQSPSSLSASVGDRVTITCRASQDVNTAVAWYQQKPGKAPKLLIYSASFLYSGVPSRFSGSRSGTDFTLTISSLQPEDFATYYCQQHYTTPPTFGQGTKVEIKRTSRGPHHHHHH

SEQ ID NO: 27 - protein, 612 aa, Artificial Sequence
  Description of Artificial Sequence: Synthetic polypeptide
MPPPRLLFFLLFLTPMEVRPEEPLVVKVEEGDNAVLQCLKGTSDGPTQQLTWSRESPLKPFLKLSLGLPGLGIHMRPLAIWLFIFNVSQQMGGFYLCQPGPPSEKAWQPGWTVNVEGSGGGGGSGGGGSGGGGSGGGGSEVQLVESGGGLVQPGGSLRLSCAASGFNIKDTYIHWVRQAPGKGLEWVARIYPTNGYTRYADSVKGRFTISADTSKNTAYLQMNSLRAEDTAVYYCSRWGGDGFYAMDYWGQGTLVTVSSASTGGGGSGGGGSGGGGSDIQMTQSPSSLSASVGDRVTITCRASQDVNTAVAWYQQKPGKAPKLLIYSASFLYSGVPSRFSGSRSGTDFTLTISSLQPEDFATYYCQQHYTTPPTFGQGTKVEIKRTDKTHTCPPCPAPELLGGPSVFLFPPKPKDTLMISRTPEVTCVVVDVSHEDPEVKFNWYVDGVEVHNAKTKPREEQYNSTYRVVSVLTVLHQDWLNGKEYKCKVSNKALPAPIEKTISKAKGQPREPQVYTLPPSREEMTKNQVSLTCLVKGFYPSDIAVEWESNGQPENNYKTTPPVLDSDGSFFLYSKLTVDKSRWQQGNVFSCSVMHEALHNHYTQKSLSLSPG

SEQ ID NO: 28 - protein, 284 aa, Artificial Sequence
  Description of Artificial Sequence: Synthetic polypeptide
MPPPRLLFFLLFLTPMEVRPEEPLVVKVEEGDNAVLQCLKGTSDGPTQQLTWSRESPLKPFLKLSLGLPGLGIHMRPLAIWLFIFNVSQQMGGFYLCQPGPPSEKAWQPGWTVNVEGSGELFRWNVSDLGGLGCGLKNRSSEGPSSPSGKLMSPKLYVWAKDRPEIWEGEPPCLPPRDSLNQSLSQDLTMAPGSTLWLSCGVPPDSVSRGPLSWTHVHPKGPKSLLSLELKDDRPARDMWVMETGLLLPRATAQDAGKYYCHRGNLTMSFHLEITARPHHHHHH

SEQ ID NO: 29 - protein, 504 aa, Artificial Sequence
  Description of Artificial Sequence: Synthetic polypeptide
MPPPRLLFFLLFLTPMEVRPEEPLVVKVEEGDNAVLQCLKGTSDGPTQQLTWSRESPLKPFLKLSLGLPGLGIHMRPLAIWLFIFNVSQQMGGFYLCQPGPPSEKAWQPGWTVNVEGSGELFRWNVSDLGGLGCGLKNRSSEGPSSPSGKLMSPKLYVWAKDRPEIWEGEPPCLPPRDSLNQSLSQDLTMAPGSTLWLSCGVPPDSVSRGPLSWTHVHPKGPKSLLSLELKDDRPARDMWVMETGLLLPRATAQDAGKYYCHRGNLTMSFHLEITARPDKTHTCPPCPAPELLGGPSVFLFPPKPKDTLMISRTPEVTCVVVDVSHEDPEVKFNWYVDGVEVHNAKTKPREEQYNSTYRVVSVLTVLHQDWLNGKEYKCKVSNKALPAPIEKTISKAKGQPREPQVYTLPPSREEMTKNQVSLTCLVKGFYPSDIAVEWESNGQPENNYKTTPPVLDSDGSFFLYSKLTVDKSRWQQGNVFSCSVMHEALHNHYTQKSLSLSPG

SEQ ID NO: 30 - protein, 128 aa, Artificial Sequence
  Description of Artificial Sequence: Synthetic polypeptide
MPPPRLLFFLLFLTPMEVRPRDSLNQSLSQDLTMAPGSTLWLSCGVPPDSVSRGPLSWTHVHPKGPKSLLSLELKDDRPARDMWVMETGLLLPRATAQDAGKYYCHRGNLTMSFHLEITARPHHHHHH

SEQ ID NO: 31 - protein, 348 aa, Artificial Sequence
  Description of Artificial Sequence: Synthetic polypeptide
MPPPRLLFFLLFLTPMEVRPRDSLNQSLSQDLTMAPGSTLWLSCGVPPDSVSRGPLSWTHVHPKGPKSLLSLELKDDRPARDMWVMETGLLLPRATAQDAGKYYCHRGNLTMSFHLEITARPDKTHTCPPCPAPELLGGPSVFLFPPKPKDTLMISRTPEVTCVVVDVSHEDPEVKFNWYVDGVEVHNAKTKPREEQYNSTYRVVSVLTVLHQDWLNGKEYKCKVSNKALPAPIEKTISKAKGQPREPQVYTLPPSREEMTKNQVSLTCLVKGFYPSDIAVEWESNGQPENNYKTTPPVLDSDGSFFLYSKLTVDKSRWQQGNVFSCSVMHEALHNHYTQKSLSLSPG

SEQ ID NO: 32 - protein, 507 aa, Artificial Sequence
  Description of Artificial Sequence: Synthetic polypeptide
MPPPRLLFFLLFLTPMEVRPEEPLVVKVEEGDNAVLQCLKGTSDGPTQQLTWSRESPLKPFLKLSLGLPGLGIHMRPLAIWLFIFNVSQQMGGFYLCQPGPPSEKAWQPGWTVNVEGSGELFRWNVSDLGGLGCGLKNRSSEGPSSPSGKLMSPKLYVWAKDRPEIWEGEPPCLPPRDSLNQSLSQDLTMAPGSTLWLSCGVPPDSVSRGPLSWTHVHPKGPKSLLSLELKDDRPARDMWVMETGLLLPRATAQDAGKYYCHRGNLTMSFHLEITARPGGGGSGGGGSGGGGSDIQMTQSPSSLSASVGDRVTITCQASQDISNYLNWYQQKPGKAPKLLIYDASNLETGVPSRFSGSGSGTDFTFTISSLQPEDIATYFCQHFDHLPLAFGGGTKVEIKRTVAAPSVFIFPPSDEQLKSGTASVVCLLNNFYPREAKVQWKVDNALQSGNSQESVTEQDSKDSTYSLSSTLTLSKADYEKHKVYACEVTHQGLSSPVTKSFNRGEC

SEQ ID NO: 33 - protein, 737 aa, Artificial Sequence
  Description of Artificial Sequence: Synthetic polypeptide
MPPPRLLFFLLFLTPMEVRPEEPLVVKVEEGDNAVLQCLKGTSDGPTQQLTWSRESPLKPFLKLSLGLPGLGIHMRPLAIWLFIFNVSQQMGGFYLCQPGPPSEKAWQPGWTVNVEGSGELFRWNVSDLGGLGCGLKNRSSEGPSSPSGKLMSPKLYVWAKDRPEIWEGEPPCLPPRDSLNQSLSQDLTMAPGSTLWLSCGVPPDSVSRGPLSWTHVHPKGPKSLLSLELKDDRPARDMWVMETGLLLPRATAQDAGKYYCHRGNLTMSFHLEITARPGGGGSGGGGSGGGGSQVQLQESGPGLVKPSETLSLTCTVSGGSVSSGDYYWTWIRQSPGKGLEWIGHIYYSGNTNYNPSLKSRLTISIDTSKTQFSLKLSSVTAADTAIYYCVRDRVTGAFDIWGQGTMVTVSSASTKGPSVFPLAPCSRSTSESTAALGCLVKDYFPEPVTVSWNSGALTSGVHTFPAVLQSSGLYSLSSVVTVPSSNFGTQTYTCNVDHKPSNTKVDKTVERKCCVECPPCPAPPVAGPSVFLFPPKPKDTLMISRTPEVTCVVVDVSHEDPEVQFNWYVDGVEVHNAKTKPREEQFQSTFRVVSVLTVVHQDWLNGKEYKCKVSNKGLPAPIEKTISKTKGQPREPQVYTLPPSREEMTKNQVSLTCLVKGFYPSDIAVEWESNGQPENNYKTTPPMLDSDGSFFLYSKLTVDKSRWQQGNVFSCSVMHEALHNHYTQKSLSLSPG

SEQ ID NO: 34 - protein, 512 aa, Artificial Sequence
  Description of Artificial Sequence: Synthetic polypeptide
METDTLLLWVLLLWVPGSTGDIQMTQSPSSLSASVGDRVTITCQASQDISNYLNWYQQKPGKAPKLLIYDASNLETGVPSRFSGSGSGTDFTFTISSLQPEDIATYFCQHFDHLPLAFGGGTKVEIKRTVAAPSVFIFPPSDEQLKSGTASVVCLLNNFYPREAKVQWKVDNALQSGNSQESVTEQDSKDSTYSLSSTLTLSKADYEKHKVYACEVTHQGLSSPVTKSFNRGECDKTHTSPPSPAPEAAGGPSPEEPLVVKVEEGDNAVLQCLKGTSDGPTQQLTWSRESPLKPFLKLSLGLPGLGIHMRPLAIWLFIFNVSQQMGGFYLCQPGPPSEKAWQPGWTVNVEGSGELFRWNVSDLGGLGCGLKNRSSEGPSSPSGKLMSPKLYVWAKDRPEIWEGEPPCLPPRDSLNQSLSQDLTMAPGSTLWLSCGVPPDSVSRGPLSWTHVHPKGPKSLLSLELKDDRPARDMWVMETGLLLPRATAQDAGKYYCHRGNLTMSFHLEITARP

SEQ ID NO: 35 - protein, 737 aa, Artificial Sequence
  Description of Artificial Sequence: Synthetic polypeptide
MEFGLSWVFLVALFRGVQCQVQLQESGPGLVKPSETLSLTCTVSGGSVSSGDYYWTWIRQSPGKGLEWIGHIYYSGNTNYNPSLKSRLTISIDTSKTQFSLKLSSVTAADTAIYYCVRDRVTGAFDIWGQGTMVTVSSASTKGPSVFPLAPCSRSTSESTAALGCLVKDYFPEPVTVSWNSGALTSGVHTFPAVLQSSGLYSLSSVVTVPSSNFGTQTYTCNVDHKPSNTKVDKTVERKCCVECPPCPAPPVAGPSVFLFPPKPKDTLMISRTPEVTCVVVDVSHEDPEVQFNWYVDGVEVHNAKTKPREEQFQSTFRVVSVLTVVHQDWLNGKEYKCKVSNKGLPAPIEKTISKTKGQPREPQVYTLPPSREEMTKNQVSLTCLVKGFYPSDIAVEWESNGQPENNYKTTPPMLDSDGSFFLYSKLTVDKSRWQQGNVFSCSVMHEALHNHYTQKSLSLSPGGGGGSGGGGSGGGGSPEEPLVVKVEEGDNAVLQCLKGTSDGPTQQLTWSRESPLKPFLKLSLGLPGLGIHMRPLAIWLFIFNVSQQMGGFYLCQPGPPSEKAWQPGWTVNVEGSGELFRWNVSDLGGLGCGLKNRSSEGPSSPSGKLMSPKLYVWAKDRPEIWEGEPPCLPPRDSLNQSLSQDLTMAPGSTLWLSCGVPPDSVSRGPLSWTHVHPKGPKSLLSLELKDDRPARDMWVMETGLLLPRATAQDAGKYYCHRGNLTMSFHLEITARP

SEQ ID NO: 36 - protein, 508 aa, Artificial Sequence
  Description of Artificial Sequence: Synthetic polypeptide
MPPPRLLFFLLFLTPMEVRPEEPLVVKVEEGDNAVLQCLKGTSDGPTQQLTWSRESPLKPFLKLSLGLPGLGIHMRPLAIWLFIFNVSQQMGGFYLCQPGPPSEKAWQPGWTVNVEGSGELFRWNVSDLGGLGCGLKNRSSEGPSSPSGKLMSPKLYVWAKDRPEIWEGEPPCLPPRDSLNQSLSQDLTMAPGSTLWLSCGVPPDSVSRGPLSWTHVHPKGPKSLLSLELKDDRPARDMWVMETGLLLPRATAQDAGKYYCHRGNLTMSFHLEITARPGGGGSGGGGSGGGGSDIQMTQSPSSLSASVGDRVTITCSVSSSVSSIYLHWYQQKPGKAPKLLIYSTSNLASGVPSRFSGSGSGTDFTLTISSLQPEDFATYYCQVYSGYPLTFGGGTKVEIKRTVAAPSVFIFPPSDEQLKSGTASVVCLLNNFYPREAKVQWKVDNALQSGNSQESVTEQDSKDSTYSLSSTLTLSKADYEKHKVYACEVTHQGLSSPVTKSFNRGEC

SEQ ID NO: 37 - protein, 733 aa, Artificial Sequence
  Description of Artificial Sequence: Synthetic polypeptide
MPPPRLLFFLLFLTPMEVRPEEPLVVKVEEGDNAVLQCLKGTSDGPTQQLTWSRESPLKPFLKLSLGLPGLGIHMRPLAIWLFIFNVSQQMGGFYLCQPGPPSEKAWQPGWTVNVEGSGELFRWNVSDLGGLGCGLKNRSSEGPSSPSGKLMSPKLYVWAKDRPEIWEGEPPCLPPRDSLNQSLSQDLTMAPGSTLWLSCGVPPDSVSRGPLSWTHVHPKGPKSLLSLELKDDRPARDMWVMETGLLLPRATAQDAGKYYCHRGNLTMSFHLEITARPGGGGSGGGGSGGGGSQVQLVQSGAEVKKPGASVKVSCKASGYTFTDYYMHWVRQAPGQGLEWMGRVNPNRRGTTYNQKFEGRVTMTTDTSTSTAYMELRSLRSDDTAVYYCARANWLDYWGQGTTVTVSSASTKGPSVFPLAPCSRSTSESTAALGCLVKDYFPEPVTVSWNSGALTSGVHTFPAVLQSSGLYSLSSVVTVPSSSLGTKTYTCNVDHKPSNTKVDKRVESKYGPPCPPCPAPEAAGGPSVFLFPPKPKDTLMISRTPEVTCVVVDVSQEDPEVQFNWYVDGVEVHNAKTKPREEQFNSTYRVVSVLTVLHQDWLNGKEYKCKVSNKGLPSSIEKTISKAKGQPREPQVYTLPPSQEEMTKNQVSLTCLVKGFYPSDIAVEWESNGQPENNYKTTPPVLDSDGSFFLYSRLTVDKSRWQEGNVFSCSVMHEALHNHYTQKSLSLSL

SEQ ID NO: 38 - protein, 513 aa, Artificial Sequence
  Description of Artificial Sequence: Synthetic polypeptide
METDTLLLWVLLLWVPGSTGDIQMTQSPSSLSASVGDRVTITCSVSSSVSSIYLHWYQQKPGKAPKLLIYSTSNLASGVPSRFSGSGSGTDFTLTISSLQPEDFATYYCQVYSGYPLTFGGGTKVEIKRTVAAPSVFIFPPSDEQLKSGTASVVCLLNNFYPREAKVQWKVDNALQSGNSQESVTEQDSKDSTYSLSSTLTLSKADYEKHKVYACEVTHQGLSSPVTKSFNRGECDKTHTSPPSPAPEAAGGPSPEEPLVVKVEEGDNAVLQCLKGTSDGPTQQLTWSRESPLKPFLKLSLGLPGLGIHMRPLAIWLFIFNVSQQMGGFYLCQPGPPSEKAWQPGWTVNVEGSGELFRWNVSDLGGLGCGLKNRSSEGPSSPSGKLMSPKLYVWAKDRPEIWEGEPPCLPPRDSLNQSLSQDLTMAPGSTLWLSCGVPPDSVSRGPLSWTHVHPKGPKSLLSLELKDDRPARDMWVMETGLLLPRATAQDAGKYYCHRGNLTMSFHLEITARP

SEQ ID NO: 39 - protein, 734 aa, Artificial Sequence
  Description of Artificial Sequence: Synthetic polypeptide
MEFGLSWVFLVALFRGVQCQVQLVQSGAEVKKPGASVKVSCKASGYTFTDYYMHWVRQAPGQGLEWMGRVNPNRRGTTYNQKFEGRVTMTTDTSTSTAYMELRSLRSDDTAVYYCARANWLDYWGQGTTVTVSSASTKGPSVFPLAPCSRSTSESTAALGCLVKDYFPEPVTVSWNSGALTSGVHTFPAVLQSSGLYSLSSVVTVPSSSLGTKTYTCNVDHKPSNTKVDKRVESKYGPPCPPCPAPEAAGGPSVFLFPPKPKDTLMISRTPEVTCVVVDVSQEDPEVQFNWYVDGVEVHNAKTKPREEQFNSTYRVVSVLTVLHQDWLNGKEYKCKVSNKGLPSSIEKTISKAKGQPREPQVYTLPPSQEEMTKNQVSLTCLVKGFYPSDIAVEWESNGQPENNYKTTPPVLDSDGSFFLYSRLTVDKSRWQEGNVFSCSVMHEALHNHYTQKSLSLSLGGGGGSGGGGSGGGGSPEEPLVVKVEEGDNAVLQCLKGTSDGPTQQLTWSRESPLKPFLKLSLGLPGLGIHMRPLAIWLFIFNVSQQMGGFYLCQPGPPSEKAWQPGWTVNVEGSGELFRWNVSDLGGLGCGLKNRSSEGPSSPSGKLMSPKLYVWAKDRPEIWEGEPPCLPPRDSLNQSLSQDLTMAPGSTLWLSCGVPPDSVSRGPLSWTHVHPKGPKSLLSLELKDDRPARDMWVMETGLLLPRATAQDAGKYYCHRGNLTMSFHLEITARP

SEQ ID NO: 40 - protein, 554 aa, Artificial Sequence
  Description of Artificial Sequence: Synthetic polypeptide
MEFGLSWVFLVALFRGVQCEVQLVESGGGLVQPGGSLRLSCAASGFNIKDTYIHWVRQAPGKGLEWVARIYPTNGYTRYADSVKGRFTISADTSKNTAYLQMNSLRAEDTAVYYCSRWGGDGFYAMDYWGQGTLVTVSSASTGGGGSGGGGSGGGGSDIQMTQSPSSLSASVGDRVTITCRASQDVNTAVAWYQQKPGKAPKLLIYSASFLYSGVPSRFSGSRSGTDFTLTISSLQPEDFATYYCQQHYTTPPTFGQGTKVEIKRTDKTHTSPPSPAPEAAGGPSPEEPLVVKVEEGDNAVLQCLKGTSDGPTQQLTWSRESPLKPFLKLSLGLPGLGIHMRPLAIWLFIFNVSQQMGGFYLCQPGPPSEKAWQPGWTVNVEGSGELFRWNVSDLGGLGCGLKNRSSEGPSSPSGKLMSPKLYVWAKDRPEIWEGEPPCLPPRDSLNQSLSQDLTMAPGSTLWLSCGVPPDSVSRGPLSWTHVHPKGPKSLLSLELKDDRPARDMWVMETGLLLPRATAQDAGKYYCHRGNLTMSFHLEITARPSRGPHHHHHH

SEQ ID NO: 41 - protein, 770 aa, Artificial Sequence
  Description of Artificial Sequence: Synthetic polypeptide
MEFGLSWVFLVALFRGVQCEVQLVESGGGLVQPGGSLRLSCAASGFNIKDTYIHWVRQAPGKGLEWVARIYPTNGYTRYADSVKGRFTISADTSKNTAYLQMNSLRAEDTAVYYCSRWGGDGFYAMDYWGQGTLVTVSSASTGGGGSGGGGSGGGGSDIQMTQSPSSLSASVGDRVTITCRASQDVNTAVAWYQQKPGKAPKLLIYSASFLYSGVPSRFSGSRSGTDFTLTISSLQPEDFATYYCQQHYTTPPTFGQGTKVEIKRTDKTHTSPPSPAPEAAGGPSPEEPLVVKVEEGDNAVLQCLKGTSDGPTQQLTWSRESPLKPFLKLSLGLPGLGIHMRPLAIWLFIFNVSQQMGGFYLCQPGPPSEKAWQPGWTVNVEGSGELFRWNVSDLGGLGCGLKNRSSEGPSSPSGKLMSPKLYVWAKDRPEIWEGEPPCLPPRDSLNQSLSQDLTMAPGSTLWLSCGVPPDSVSRGPLSWTHVHPKGPKSLLSLELKDDRPARDMWVMETGLLLPRATAQDAGKYYCHRGNLTMSFHLEITARPDKTHTCPPCPAPELLGGPSVFLFPPKPKDTLMISRTPEVTCVVVDVSHEDPEVKFNWYVDGVEVHNAKTKPREEQYNSTYRVVSVLTVLHQDWLNGKEYKCKVSNKALPAPIEKTISKAKGQPREPQVYTLPPSREEMTKNQVSLTCLVKGFYPSDIAVEWESNGQPENNYKTTPPVLDSDGSFFLYSKLTVDKSRWQQGNVFSCSVMHEALHNHYTQKSLSLSPG

SEQ ID NO: 42 - protein, 555 aa, Artificial Sequence
  Description of Artificial Sequence: Synthetic polypeptide
MPPPRLLFFLLFLTPMEVRPEEPLVVKVEEGDNAVLQCLKGTSDGPTQQLTWSRESPLKPFLKLSLGLPGLGIHMRPLAIWLFIFNVSQQMGGFYLCQPGPPSEKAWQPGWTVNVEGSGELFRWNVSDLGGLGCGLKNRSSEGPSSPSGKLMSPKLYVWAKDRPEIWEGEPPCLPPRDSLNQSLSQDLTMAPGSTLWLSCGVPPDSVSRGPLSWTHVHPKGPKSLLSLELKDDRPARDMWVMETGLLLPRATAQDAGKYYCHRGNLTMSFHLEITARPGGGGSGGGGSGGGGSGGGGSEVQLVESGGGLVQPGGSLRLSCAASGFNIKDTYIHWVRQAPGKGLEWVARIYPTNGYTRYADSVKGRFTISADTSKNTAYLQMNSLRAEDTAVYYCSRWGGDGFYAMDYWGQGTLVTVSSASTGGGGSGGGGSGGGGSDIQMTQSPSSLSASVGDRVTITCRASQDVNTAVAWYQQKPGKAPKLLIYSASFLYSGVPSRFSGSRSGTDFTLTISSLQPEDFATYYCQQHYTTPPTFGQGTKVEIKRTSRGPHHHHHH

SEQ ID NO: 43 - protein, 771 aa, Artificial Sequence
  Description of Artificial Sequence: Synthetic polypeptide
MPPPRLLFFLLFLTPMEVRPEEPLVVKVEEGDNAVLQCLKGTSDGPTQQLTWSRESPLKPFLKLSLGLPGLGIHMRPLAIWLFIFNVSQQMGGFYLCQPGPPSEKAWQPGWTVNVEGSGELFRWNVSDLGGLGCGLKNRSSEGPSSPSGKLMSPKLYVWAKDRPEIWEGEPPCLPPRDSLNQSLSQDLTMAPGSTLWLSCGVPPDSVSRGPLSWTHVHPKGPKSLLSLELKDDRPARDMWVMETGLLLPRATAQDAGKYYCHRGNLTMSFHLEITARPGGGGSGGGGSGGGGSGGGGSEVQLVESGGGLVQPGGSLRLSCAASGFNIKDTYIHWVRQAPGKGLEWVARIYPTNGYTRYADSVKGRFTISADTSKNTAYLQMNSLRAEDTAVYYCSRWGGDGFYAMDYWGQGTLVTVSSASTGGGGSGGGGSGGGGSDIQMTQSPSSLSASVGDRVTITCRASQDVNTAVAWYQQKPGKAPKLLIYSASFLYSGVPSRFSGSRSGTDFTLTISSLQPEDFATYYCQQHYTTPPTFGQGTKVEIKRTDKTHTCPPCPAPELLGGPSVFLFPPKPKDTLMISRTPEVTCVVVDVSHEDPEVKFNWYVDGVEVHNAKTKPREEQYNSTYRVVSVLTVLHQDWLNGKEYKCKVSNKALPAPIEKTISKAKGQPREPQVYTLPPSREEMTKNQVSLTCLVKGFYPSDIAVEWESNGQPENNYKTTPPVLDSDGSFFLYSKLTVDKSRWQQGNVFSCSVMHEALHNHYTQKSLSLSPG

SEQ ID NO: 44-45 - skipped (2 entries)

SEQ ID NO: 46 - protein, 234 aa, Artificial Sequence
  Description of Artificial Sequence: Synthetic polypeptide
MESDESGLPAMEIECRITGTLNGVEFELVGGGEGTPEQGRMTNKMKSTKGALTFSPYLLSHVMGYGFYHFGTYPSGYENPFLHAINNGGYTNTRIEKYEDGGVLHVSFSYRYEAGRVIGDFKVMGTGFPEDSVIFTDKIIRSNATVEHLHPMGDNDLDGSFTRTFSLRDGGYYSSVVDSHMHFKSAIHPSILQNGGPMFAFRRVEEDHSNTELGIVEYQHAFKTPDADAGEERV

SEQ ID NO: 47 - protein, 234 aa, Artificial Sequence; identical to SEQ ID NO: 46
  Description of Artificial Sequence: Synthetic polypeptide

SEQ ID NO: 48 - protein, 234 aa, Artificial Sequence; identical to SEQ ID NO: 46
  Description of Artificial Sequence: Synthetic polypeptide

SEQ ID NO: 49 - protein, 234 aa, Artificial Sequence; identical to SEQ ID NO: 46
  Description of Artificial Sequence: Synthetic polypeptide

SEQ ID NO: 50 - protein, 755 aa, Artificial Sequence
  Description of Artificial Sequence: Synthetic polypeptide
MPPPRLLFFLLFLTPMEVRPEEPLVVKVEEGDNAVLQCLKGTSDGPTQQLTWSRESPLKPFLKLSLGLPGLGIHMRPLAIWLFIFNVSQQMGGFYLCQPGPPSEKAWQPGWTVNVEGSGELFRWNVSDLGGLGCGLKNRSSEGPSSPSGKLMSPKLYVWAKDRPEIWEGEPPCLPPRDSLNQSLSQDLTMAPGSTLWLSCGVPPDSVSRGPLSWTHVHPKGPKSLLSLELKDDRPARDMWVMETGLLLPRATAQDAGKYYCHRGNLTMSFHLEITARPVLWHWLLRTGGWKGGGGSGGGGSGGGGSGGGGSQVQLQESGPGLVKPSETLSLTCTVSGGSVSSGDYYWTWIRQSPGKGLEWIGHIYYSGNTNYNPSLKSRLTISIDTSKTQFSLKLSSVTAADTAIYYCVRDRVTGAFDIWGQGTMVTVSSASTKGPSVFPLAPCSRSTSESTAALGCLVKDYFPEPVTVSWNSGALTSGVHTFPAVLQSSGLYSLSSVVTVPSSNFGTQTYTCNVDHKPSNTKVDKTVERKCCVECPPCPAPPVAGPSVFLFPPKPKDTLMISRTPEVTCVVVDVSHEDPEVQFNWYVDGVEVHNAKTKPREEQFQSTFRVVSVLTVVHQDWLNGKEYKCKVSNKGLPAPIEKTISKTKGQPREPQVYTLPPSREEMTKNQVSLTCLVKGFYPSDIAVEWESNGQPENNYKTTPPMLDSDGSFFLYSKLTVDKSRWQQGNVFSCSVMHEALHNHYTQKSLSLSPG

SEQ ID NO: 51 - protein, 751 aa, Artificial Sequence
  Description of Artificial Sequence: Synthetic polypeptide
MPPPRLLFFLLFLTPMEVRPEEPLVVKVEEGDNAVLQCLKGTSDGPTQQLTWSRESPLKPFLKLSLGLPGLGIHMRPLAIWLFIFNVSQQMGGFYLCQPGPPSEKAWQPGWTVNVEGSGELFRWNVSDLGGLGCGLKNRSSEGPSSPSGKLMSPKLYVWAKDRPEIWEGEPPCLPPRDSLNQSLSQDLTMAPGSTLWLSCGVPPDSVSRGPLSWTHVHPKGPKSLLSLELKDDRPARDMWVMETGLLLPRATAQDAGKYYCHRGNLTMSFHLEITARPVLWHWLLRTGGWKGGGGSGGGGSGGGGSGGGGSQVQLVQSGAEVKKPGASVKVSCKASGYTFTDYYMHWVRQAPGQGLEWMGRVNPNRRGTTYNQKFEGRVTMTTDTSTSTAYMELRSLRSDDTAVYYCARANWLDYWGQGTTVTVSSASTKGPSVFPLAPCSRSTSESTAALGCLVKDYFPEPVTVSWNSGALTSGVHTFPAVLQSSGLYSLSSVVTVPSSSLGTKTYTCNVDHKPSNTKVDKRVESKYGPPCPPCPAPEAAGGPSVFLFPPKPKDTLMISRTPEVTCVVVDVSQEDPEVQFNWYVDGVEVHNAKTKPREEQFNSTYRVVSVLTVLHQDWLNGKEYKCKVSNKGLPSSIEKTISKAKGQPREPQVYTLPPSQEEMTKNQVSLTCLVKGFYPSDIAVEWESNGQPENNYKTTPPVLDSDGSFFLYSRLTVDKSRWQEGNVFSCSVMHEALHNHYTQKSLSLSL

SEQ ID NO: 52 - protein, 570 aa, Artificial Sequence
  Description of Artificial Sequence: Synthetic polypeptide
MPPPRLLFFLLFLTPMEVRPEEPLVVKVEEGDNAVLQCLKGTSDGPTQQLTWSRESPLKPFLKLSLGLPGLGIHMRPLAIWLFIFNVSQQMGGFYLCQPGPPSEKAWQPGWTVNVEGSGELFRWNVSDLGGLGCGLKNRSSEGPSSPSGKLMSPKLYVWAKDRPEIWEGEPPCLPPRDSLNQSLSQDLTMAPGSTLWLSCGVPPDSVSRGPLSWTHVHPKGPKSLLSLELKDDRPARDMWVMETGLLLPRATAQDAGKYYCHRGNLTMSFHLEITARPVLWHWLLRTGGWKGGGGSGGGGSGGGGSGGGGSQVQLVQSGAEDKKPGESVKISCKASGYTFTNYGMNWVRQAPGQGLKWMGWINTYTGESTYADDFKGRFAFSLDTSASTAYLQLSSLRGEDTAVYFCARFAIKGDYWGQGTTVTVSSASTGGGGSGGGGSGGGGSGGGGSDIVMTQSPLSLEVSPGEPASISCRSTKSLLHSDGITYLYWYLQKPGQSPQLLIYQLSNLASGVPDRFSSSGSGTDFTLKISRVEAEDEGTYYCAQNLEIPRTFGQGTKLEIKRTHHHHHH

SEQ ID NO: 53 - protein, 565 aa, Artificial Sequence
  Description of Artificial Sequence: Synthetic polypeptide
MPPPRLLFFLLFLTPMEVRPEEPLVVKVEEGDNAVLQCLKGTSDGPTQQLTWSRESPLKPFLKLSLGLPGLGIHMRPLAIWLFIFNVSQQMGGFYLCQPGPPSEKAWQPGWTVNVEGSGELFRWNVSDLGGLGCGLKNRSSEGPSSPSGKLMSPKLYVWAKDRPEIWEGEPPCLPPRDSLNQSLSQDLTMAPGSTLWLSCGVPPDSVSRGPLSWTHVHPKGPKSLLSLELKDDRPARDMWVMETGLLLPRATAQDAGKYYCHRGNLTMSFHLEITARPVLWHWLLRTGGWKGGGGSGGGGSGGGGSGGGGSQVQLVQSGAEDVKPDASVKLSCKASGYTFTDYYMHWVRQAPGQGLEWMGRVNPNRRGTTYNQKFEGRVTMTTDTSTSTAYMQLSSLRGEDTAVYYCARANWLDYWGQGTTVTVSSASTGGGGSGGGGSGGGGSGGGGSDIQMTQSPSSLEASVGDRVTITCSVSSSVSSIYLHWYQQKPGKSPKLLIYSTSNLASGVPDRFSGSGSGTDFTLTISSLQAEDEGTYYCQVYSGYPLTFGGGTKLEIKRTHHHHHH

SEQ ID NO: 54 - protein, 568 aa, Artificial Sequence
  Description of Artificial Sequence: Synthetic polypeptide
MPPPRLLFFLLFLTPMEVRPEEPLVVKVEEGDNAVLQCLKGTSDGPTQQLTWSRESPLKPFLKLSLGLPGLGIHMRPLAIWLFIFNVSQQMGGFYLCQPGPPSEKAWQPGWTVNVEGSGELFRWNVSDLGGLGCGLKNRSSEGPSSPSGKLMSPKLYVWAKDRPEIWEGEPPCLPPRDSLNQSLSQDLTMAPGSTLWLSCGVPPDSVSRGPLSWTHVHPKGPKSLLSLELKDDRPARDMWVMETGLLLPRATAQDAGKYYCHRGNLTMSFHLEITARPVLWHWLLRTGGWKGGGGSGGGGSGGGGSGGGGSQVQLQESGPGDVKPSETLSLTCTVSGGSVSSGDYYWTWIRQSPGKGLEWIGHIYYSGNTNYNPSLKSRLTISIDTSKTTFSLQLSSVTGEDTAIYYCVRDRVTGAFDIWGQGTTVTVSSASTGGGGSGGGGSGGGGSGGGGSDIQMTQSPSSLEASVGDRVTITCQASQDISNYLNWYQQKPGKSPKLLIYDASNLETGVPDRFSGSGSGTDFTFTISSLQAEDEGTYFCQHFDHLPLAFGGGTKLEIKRTHHHHHH

SEQ ID NO: 55 - protein, 564 aa, Artificial Sequence
  Description of Artificial Sequence: Synthetic polypeptide
MPPPRLLFFLLFLTPMEVRPEEPLVVKVEEGDNAVLQCLKGTSDGPTQQLTWSRESPLKPFLKLSLGLPGLGIHMRPLAIWLFIFNVSQQMGGFYLCQPGPPSEKAWQPGWTVNVEGSGELFRWNVSDLGGLGCGLKNRSSEGPSSPSGKLMSPKLYVWAKDRPEIWEGEPPCLPPRDSLNQSLSQDLTMAPGSTLWLSCGVPPDSVSRGPLSWTHVHPKGPKSLLSLELKDDRPARDMWVMETGLLLPRATAQDAGKYYCHRGNLTMSFHLEITARPVLWHWLLRTGGWKGGGGSGGGGSGGGGSGGGGSEVQLVESGGGLVQPGGSLRLSCAASGFNIKDTYIHWVRQAPGKGLEWVARIYPTNGYTRYADSVKGRFTISADTSKNTAYLQMNSLRAEDTAVYYCSRWGGDGFYAMDYWGQGTLVTVSSASTGGGGSGGGGSGGGGSDIQMTQSPSSLSASVGDRVTITCRASQDVNTAVAWYQQKPGKAPKLLIYSASFLYSGVPSRFSGSRSGTDFTLTISSLQPEDFATYYCQQHYTTPPTFGQGTKVEIKRTHHHHHH

SEQ ID NO: 56 - protein, 784 aa, Artificial Sequence
  Description of Artificial Sequence: Synthetic polypeptide
MPPPRLLFFLLFLTPMEVRPEEPLVVKVEEGDNAVLQCLKGTSDGPTQQLTWSRESPLKPFLKLSLGLPGLGIHMRPLAIWLFIFNVSQQMGGFYLCQPGPPSEKAWQPGWTVNVEGSGELFRWNVSDLGGLGCGLKNRSSEGPSSPSGKLMSPKLYVWAKDRPEIWEGEPPCLPPRDSLNQSLSQDLTMAPGSTLWLSCGVPPDSVSRGPLSWTHVHPKGPKSLLSLELKDDRPARDMWVMETGLLLPRATAQDAGKYYCHRGNLTMSFHLEITARPVLWHWLLRTGGWKDKTHTCPPCPAPELLGGPSVFLFPPKPKDTLMISRTPEVTCVVVDVSHEDPEVKFNWYVDGVEVHNAKTKPREEQYNSTYRVVSVLTVLHQDWLNGKEYKCKVSNKALPAPIEKTISKAKGQPREPQVYTLPPSREEMTKNQVSLTCLVKGFYPSDIAVEWESNGQPENNYKTTPPVLDSDGSFFLYSKLTVDKSRWQQGNVFSCSVMHEALHNHYTQKSLSLSPGGGGGSGGGGSGGGGSGGGGSEVQLVESGGGLVQPGGSLRLSCAASGFNIKDTYIHWVRQAPGKGLEWVARIYPTNGYTRYADSVKGRFTISADTSKNTAYLQMNSLRAEDTAVYYCSRWGGDGFYAMDYWGQGTLVTVSSASTGGGGSGGGGSGGGGSDIQMTQSPSSLSASVGDRVTITCRASQDVNTAVAWYQQKPGKAPKLLIYSASFLYSGVPSRFSGSRSGTDFTLTISSLQPEDFATYYCQQHYTTPPTFGQGTKVEIKRT

SEQ ID NO: 57 - protein, 929 aa, Artificial Sequence
  Description of Artificial Sequence: Synthetic polypeptide
MELAALCRWGLLLALLPPGAASTQVCTGTDMKLRLPASPETHLDMLRHLYQGCQVVQGNLELTYLPTNASLSFLQDIQEVQGYVLIAHNQVRQVPLQRLRIVRGTQLFEDNYALAVLDNGDPLNNTTPVTGASPGGLRELQLRSLTEILKGGVLIQRNPQLCYQDTILWKDIFHKNNQLALTLIDTNRSRACHPCSPMCKGSRCWGESSEDCQSLTRTVCAGGCARCKGPLPTDCCHEQCAAGCTGPKHSDCLACLHFNHSGICELHCPALVTYNTDTFESMPNPEGRYTFGASCVTACPYNYLSTDVGSCTLVCPLHNQEVTAEDGTQRCEKCSKPCARVCYGLGMEHLREVRAVTSANIQEFAGCKKIFGSLAFLPESFDGDPASNTAPLQPEQLQVFETLEEITGYLYISAWPDSLPDLSVFQNLQVIRGRILHNGAYSLTLQGLGISWLGLRSLRELGSGLALIHHNTHLCFVHTVPWDQLFRNPHQALLHTANRPEDECVGEGLACHQLCARGHCWGPGPTQCVNCSQFLRGQECVEECRVLQGLPREYVNARHCLPCHPECQPQNGSVTCFGPEADQCVACAHYKDPPFCVARCPSGVKPDLSYMPIWKFPDEEGACQPCPINCTHSCVDLDDKGCPAEQRASPLTGGGGSGGGGSGGGGSGGGGSQVQLQESGPGDVKPSETLSLTCTVSGGSVSSGDYYWTWIRQSPGKGLEWIGHIYYSGNTNYNPSLKSRLTISIDTSKTTFSLQLSSVTGEDTAIYYCVRDRVTGAFDIWGQGTTVTVSSASTGGGGSGGGGSGGGGSGGGGSDIQMTQSPSSLEASVGDRVTITCQASQDISNYLNWYQQKPGKSPKLLIYDASNLETGVPDRFSGSGSGTDFTFTISSLQAEDEGTYFCQHFDHLPLAFGGGTKLEIKRTHHHHHH

SEQ ID NO: 58 - protein, 454 aa, Artificial Sequence
  Description of Artificial Sequence: Synthetic polypeptide
MELAALCRWGLLLALLPPGAASNRPEDECVGEGLACHQLCARGHCWGPGPTQCVNCSQFLRGQECVEECRVLQGLPREYVNARHCLPCHPECQPQNGSVTCFGPEADQCVACAHYKDPPFCVARCPSGVKPDLSYMPIWKFPDEEGACQPCPINCTHSCVDLDDKGCPAEQRASPLTGGGGSGGGGSGGGGSGGGGSQVQLQESGPGDVKPSETLSLTCTVSGGSVSSGDYYWTWIRQSPGKGLEWIGHIYYSGNTNYNPSLKSRLTISIDTSKTTFSLQLSSVTGEDTAIYYCVRDRVTGAFDIWGQGTTVTVSSASTGGGGSGGGGSGGGGSGGGGSDIQMTQSPSSLEASVGDRVTITCQASQDISNYLNWYQQKPGKSPKLLIYDASNLETGVPDRFSGSGSGTDFTFTISSLQAEDEGTYFCQHFDHLPLAFGGGTKLEIKRTHHHHHH

SEQ ID NO: 59-62 - skipped (4 entries)

SEQ ID NO: 63 - protein, 563 aa, Artificial Sequence
  Description of Artificial Sequence: Synthetic polypeptide
MPPPRLLFFLLFLTPMEVRPEEPLVVKVEEGDNAVLQCLKGTSDGPTQQLTWSRESPLKPFLKLSLGLPGLGIHMRPLAIWLFIFNVSQQMGGFYLCQPGPPSEKAWQPGWTVNVEGSGELFRWNVSDLGGLGCGLKNRSSEGPSSPSGKLMSPKLYVWAKDRPEIWEGEPPCLPPRDSLNQSLSQDLTMAPGSTLWLSCGVPPDSVSRGPLSWTHVHPKGPKSLLSLELKDDRPARDMWVMETGLLLPRATAQDAGKYYCHRGNLTMSFHLEITARPVLWHWLLRTGGWKGGGGSGGGGSGGGGSGGGGSEVQLQQSGAELVKPGASVKMSCKASGYTFTSYNMHWVKQTPGQGLEWIGAIYPGNGDTSYNQKFKGKATLTADKSSSTAYMQLSSLTSEDSADYYCARSNYYGSSYWFFDVWGAGTTVTVSSGSTSGGGSGGGSGGGGSSDIVLTQSPAILSASPGEKVTMTCRASSSVNYMDWYQKKPGSSPKPWIYATSNLASGVPARFSGSGSGTSYSLTISRVEAEDAATYYCQQWSFNPPTFGGGTKLEIKHHHHHH

SEQ ID NO: 64 - protein, 605 aa, Artificial Sequence
  Description of Artificial Sequence: Synthetic polypeptide
MHLLGPWLLLLVLEYLAFSDSSKWVFEHPETLYAWEGACVWIPCTYRALDGDLESFILFHNPEYNKNTSKFDGTRLYESTKDGKVPSEQKRVQFLGDKNKACTLSIHPVHLNDSGQLGLRMESKTEKWMERIHLNVSERPFPPHIQLPPEIQESQEVTLTCLLNFSCYGYPIQLQWLLEGVPMRQAAVTSTSLTIKSVFTRSELKFSPQWSHHGKIVTCQLQDADGKFLSNDTVQLNVKHTPKLEIKVTPSDAIVREGDSVTMTCEVSSSNPEYTTVSWLKDGTSLKKQNTFTLNLREVTKDQSGKYCCQVSNDVGPGRSEEVFLQVQYAPEGGGGSGGGGSGGGGSGGGGSDIQMTQTTSSLSASLGDRVTISCRASQDISKYLNWYQQKPDGTVKLLIYHTSRLHSGVPSRFSGSGSGTDYSLTISNLEQEDIATYFCQQGNTLPYTFGGGTKLEITGGGGSGGGGSGGGGSGGGGSEVKLQESGPGLVAPSQSLSVTCTVSGVSLPDYGVSWIRQPPRKGLEWLGVIWGSETTYYNSALKSRLTIIKDNSKSQVFLKMNSLQTDDTAIYYCAKHYYYGGSYAMDYWGQGTSVTVSSHHHHHH

SEQ ID NO: 65 - protein, 604 aa, Artificial Sequence
  Description of Artificial Sequence: Synthetic polypeptide
MHLLGPWLLLLVLEYLAFSDSSKWVFEHPETLYAWEGACVWIPCTYRALDGDLESFILFHNPEYNKNTSKFDGTRLYESTKDGKVPSEQKRVQFLGDKNKACTLSIHPVHLNDSGQLGLRMESKTEKWMERIHLNVSERPFPPHIQLPPEIQESQEVTLTCLLNFSCYGYPIQLQWLLEGVPMRQAAVTSTSLTIKSVFTRSELKFSPQWSHHGKIVTCQLQDADGKFLSNDTVQLNVKHTPKLEIKVTPSDAIVREGDSVTMTCEVSSSNPEYTTVSWLKDGTSLKKQNTFTLNLREVTKDQSGKYCCQVSNDVGPGRSEEVFLQVQYAPEGGGGSGGGGSGGGGSGGGGSEVQLQQSGAELVKPGASVKMSCKASGYTFTSYNMHWVKQTPGQGLEWIGAIYPGNGDTSYNQKFKGKATLTADKSSSTAYMQLSSLTSEDSADYYCARSNYYGSSYWFFDVWGAGTTVTVSSGSTSGGGSGGGSGGGGSSDIVLTQSPAILSASPGEKVTMTCRASSSVNYMDWYQKKPGSSPKPWIYATSNLASGVPARFSGSGSGTSYSLTISRVEAEDAATYYCQQWSFNPPTFGGGTKLEIKHHHHHH

SEQ ID NO: 66 - skipped

SEQ ID NO: 67 - protein, 579 aa, Artificial Sequence
  Description of Artificial Sequence: Synthetic polypeptide
MPPPRLLFFLLFLTPMEVRPEEPLVVKVEEGDNAVLQCLKGTSDGPTQQLTWSRESPLKPFLKLSLGLPGLGIHMRPLAIWLFIFNVSQQMGGFYLCQPGPPSEKAWQPGWTVNVEGSGELFRWNVSDLGGLGCGLKNRSSEGPSSPSGKLMSPKLYVWAKDRPEIWEGEPPCLPPRDSLNQSLSQDLTMAPGSTLWLSCGVPPDSVSRGPLSWTHVHPKGPKSLLSLELKDDRPARDMWVMETGLLLPRATAQDAGKYYCHRGNLTMSFHLEITARPVLWHWLLRTGGWKGGGGSGGGGSGGGGSGGGGSDILMTQSPSSMSVSLGDTVSITCHSSQDINSNIGWLQQRPGKSFKGLIYHGTNLDDEVPSRFSGSGSGADYSLTISSLESEDFADYYCVQYAQFPWTFGGGTKLEIKRGGGGSGGGGSGGGGSGGGGSMRVLILLWLFTAFPGVLSDVQLQESGPSLVKPSQSLSLTCTVTGYSITSDFAWNWIRQFPGNKLEWMGYISYSGNTRYNPSLKSRISITRDTSKNQFFLQLNSVTIEDTATYYCVTAGRGFPYWGQGTLVTVSAHHHHHH

SEQ ID NO: 68 - protein, 620 aa, Artificial Sequence
  Description of Artificial Sequence: Synthetic polypeptide
MHLLGPWLLLLVLEYLAFSDSSKWVFEHPETLYAWEGACVWIPCTYRALDGDLESFILFHNPEYNKNTSKFDGTRLYESTKDGKVPSEQKRVQFLGDKNKACTLSIHPVHLNDSGQLGLRMESKTEKWMERIHLNVSERPFPPHIQLPPEIQESQEVTLTCLLNFSCYGYPIQLQWLLEGVPMRQAAVTSTSLTIKSVFTRSELKFSPQWSHHGKIVTCQLQDADGKFLSNDTVQLNVKHTPKLEIKVTPSDAIVREGDSVTMTCEVSSSNPEYTTVSWLKDGTSLKKQNTFTLNLREVTKDQSGKYCCQVSNDVGPGRSEEVFLQVQYAPEGGGGSGGGGSGGGGSGGGGSDILMTQSPSSMSVSLGDTVSITCHSSQDINSNIGWLQQRPGKSFKGLIYHGTNLDDEVPSRFSGSGSGADYSLTISSLESEDFADYYCVQYAQFPWTFGGGTKLEIKRGGGGSGGGGSGGGGSGGGGSMRVLILLWLFTAFPGVLSDVQLQESGPSLVKPSQSLSLTCTVTGYSITSDFAWNWIRQFPGNKLEWMGYISYSGNTRYNPSLKSRISITRDTSKNQFFLQLNSVTIEDTATYYCVTAGRGFPYWGQGTLVTVSAHHHHHH

SEQ ID NO: 69-70 - skipped (2 entries)

SEQ ID NO: 71 - protein, 535 aa, Artificial Sequence
  Description of Artificial Sequence: Synthetic polypeptide
MLRLLLALNLFPSIQVTGDIQMTQTTSSLSASLGDRVTISCRASQDISKYLNWYQQKPDGTVKLLIYHTSRLHSGVPSRFSGSGSGTDYSLTISNLEQEDIATYFCQQGNTLPYTFGGGTKLEITGGGGSGGGGSGGGGSGGGGSEVKLQESGPGLVAPSQSLSVTCTVSGVSLPDYGVSWIRQPPRKGLEWLGVIWGSETTYYNSALKSRLTIIKDNSKSQVFLKMNSLQTDDTAIYYCAKHYYYGGSYAMDYWGQGTSVTVSSDYKDDDDKIEVMYPPPYLDNEKSNGTIIHVKGKHLCPSPLFPGPSKPFWVLVVVGGVLACYSLLVTVAFIIFWVRSKRSRLLHSDYMNMTPRRPGPTRKHYQPYAPPRDFAAYRSKRGRKKLLYIFKQPFMRPVQTTQEEDGCSCRFPEEEEGGCELRVKFSRSADAPAYQQGQNQLYNELNLGRREEYDVLDKRRGRDPEMGGKPQRRKNPQEGLYNELQKDKMAEAYSEIGMKGERRRGKGHDGLYQGLSTATKDTYDALHMQALPPR

SEQ ID NO: 72 - protein, 535 aa, Artificial Sequence; identical to SEQ ID NO: 71
  Description of Artificial Sequence: Synthetic polypeptide

SEQ ID NO: 73 - protein, 551 aa, Artificial Sequence
  Description of Artificial Sequence: Synthetic polypeptide
MPPPRLLFFLLFLTPMEVRPEEPLVVKVEEGDNAVLQCLKGTSDGPTQQLTWSRESPLKPFLKLSLGLPGLGIHMRPLAIWLFIFNVSQQMGGFYLCQPGPPSEKAWQPGWTVNVEGSGELFRWNVSDLGGLGCGLKNRSSEGPSSPSGKLMSPKLYVWAKDRPEIWEGEPPCLPPRDSLNQSLSQDLTMAPGSTLWLSCGVPPDSVSRGPLSWTHVHPKGPKSLLSLELKDDRPARDMWVMETGLLLPRATAQDAGKYYCHRGNLTMSFHLEITARPGGGGSGGGGSGGGGSGGGGSEVQLVESGGGLVQPGGSLRLSCAASGFNIKDTYIHWVRQAPGKGLEWVARIYPTNGYTRYADSVKGRFTISADTSKNTAYLQMNSLRAEDTAVYYCSRWGGDGFYAMDYWGQGTLVTVSSASTGGGGSGGGGSGGGGSDIQMTQSPSSLSASVGDRVTITCRASQDVNTAVAWYQQKPGKAPKLLIYSASFLYSGVPSRFSGSRSGTDFTLTISSLQPEDFATYYCQQHYTTPPTFGQGTKVEIKRTHHHHHH

SEQ ID NO: 74 - protein, 551 aa, Artificial Sequence; identical to SEQ ID NO: 73
  Description of Artificial Sequence: Synthetic polypeptide

SEQ ID NO: 75 - protein, 551 aa, Artificial Sequence; identical to SEQ ID NO: 73
  Description of Artificial Sequence: Synthetic polypeptide

SEQ ID NO: 76 - protein, 551 aa, Artificial Sequence; identical to SEQ ID NO: 73
  Description of Artificial Sequence: Synthetic polypeptide

SEQ ID NO: 77 - protein, 551 aa, Artificial Sequence; identical to SEQ ID NO: 73
  Description of Artificial Sequence: Synthetic polypeptide

SEQ ID NO: 78 - protein, 505 aa, Artificial Sequence
  Description of Artificial Sequence: Synthetic polypeptide
MDFQVQIFSFLLISASVIMSRMAQVKLQESGAELVKPGASVKMSCKASGYTFTSYNMHWVKQTPGQGLEWIGAIYPGNGDTSYNQKFKGKATLTADKSSSTAYMQLSSLTSEDSADYYCARSNYYGSSYWFFDVWGQGTTVTVSSGGGGSGGGGSGGGGSDIELTQSPTILSASPGEKVTMTCRASSSVNYMDWYQKKPGSSPKPWIYATSNLASGVPARFSGSGSGTSYSLTISRVEAEDAATYYCQQWSFNPPTFGGGTKLEIKRAAAGDPAEPKSPDKTHTCPPCPAPELLGGPSVFLFPPKPKDTLMISRTPEVTCVVVDVSHEDPEVKFNWYVDGVEVHNAKTKPREEQYNSTYRVVSVLTVLHQDWLNGKEYKCKVSNKALPAPIEKTISKAKGQPREPQVYTLPPSREEMTKNQVSLTCLVKGFYPSDIAVEWESNGQPENNYKTTPPVLDSDGSFFLYSKLTVDKSRWQQGNVFSCSVMHEALHNHYTQKSLSLSPG

SEQ ID NO: 79 - protein, 276 aa, Artificial Sequence
  Description of Artificial Sequence: Synthetic polypeptide
MDFQVQIFSFLLISASVIMSRMAQVKLQESGAELVKPGASVKMSCKASGYTFTSYNMHWVKQTPGQGLEWIGAIYPGNGDTSYNQKFKGKATLTADKSSSTAYMQLSSLTSEDSADYYCARSNYYGSSYWFFDVWGQGTTVTVSSGGGGSGGGGSGGGGSDIELTQSPTILSASPGEKVTMTCRASSSVNYMDWYQKKPGSSPKPWIYATSNLASGVPARFSGSGSGTSYSLTISRVEAEDAATYYCQQWSFNPPTFGGGTKLEIKRAAAHHHHHH

SEQ ID NO: 80 - protein, 505 aa, Artificial Sequence
  Description of Artificial Sequence: Synthetic polypeptide
MDFQVQIFSFLLISASVIMSRDIELTQSPTILSASPGEKVTMTCRASSSVNYMDWYQKKPGSSPKPWIYATSNLASGVPARFSGSGSGTSYSLTISRVEAEDAATYYCQQWSFNPPTFGGGTKLEIKRGGGGSGGGGSGGGGSMAQVKLQESGAELVKPGASVKMSCKASGYTFTSYNMHWVKQTPGQGLEWIGAIYPGNGDTSYNQKFKGKATLTADKSSSTAYMQLSSLTSEDSADYYCARSNYYGSSYWFFDVWGQGTTVTVSSAAAGDPAEPKSPDKTHTCPPCPAPELLGGPSVFLFPPKPKDTLMISRTPEVTCVVVDVSHEDPEVKFNWYVDGVEVHNAKTKPREEQYNSTYRVVSVLTVLHQDWLNGKEYKCKVSNKALPAPIEKTISKAKGQPREPQVYTLPPSREEMTKNQVSLTCLVKGFYPSDIAVEWESNGQPENNYKTTPPVLDSDGSFFLYSKLTVDKSRWQQGNVFSCSVMHEALHNHYTQKSLSLSPG

SEQ ID NO: 81 - protein, 276 aa, Artificial Sequence
  Description of Artificial Sequence: Synthetic polypeptide
MDFQVQIFSFLLISASVIMSRDIELTQSPTILSASPGEKVTMTCRASSSVNYMDWYQKKPGSSPKPWIYATSNLASGVPARFSGSGSGTSYSLTISRVEAEDAATYYCQQWSFNPPTFGGGTKLEIKRGGGGSGGGGSGGGGSMAQVKLQESGAELVKPGASVKMSCKASGYTFTSYNMHWVKQTPGQGLEWIGAIYPGNGDTSYNQKFKGKATLTADKSSSTAYMQLSSLTSEDSADYYCARSNYYGSSYWFFDVWGQGTTVTVSSAAAHHHHHH

SEQ ID NO: 82 - protein, 782 aa, Artificial Sequence
  Description of Artificial Sequence: Synthetic polypeptide
MPPPRLLFFLLFLTPMEVRPEEPLVVKVEEGDNAVLQCLKGTSDGPTQQLTWSRESPLKPFLKLSLGLPGLGIHMRPLAIWLFIFNVSQQMGGFYLCQPGPPSEKAWQPGWTVNVEGSGELFRWNVSDLGGLGCGLKNRSSEGPSSPSGKLMSPKLYVWAKDRPEIWEGEPPCLPPRDSLNQSLSQDLTMAPGSTLWLSCGVPPDSVSRGPLSWTHVHPKGPKSLLSLELKDDRPARDMWVMETGLLLPRATAQDAGKYYCHRGNLTMSFHLEITARPGGGGSGGGGSGGGGSGGGGSMAQVKLQESGAELVKPGASVKMSCKASGYTFTSYNMHWVKQTPGQGLEWIGAIYPGNGDTSYNQKFKGKATLTADKSSSTAYMQLSSLTSEDSADYYCARSNYYGSSYWFFDVWGQGTTVTVSSGGGGSGGGGSGGGGSDIELTQSPTILSASPGEKVTMTCRASSSVNYMDWYQKKPGSSPKPWIYATSNLASGVPARFSGSGSGTSYSLTISRVEAEDAATYYCQQWSFNPPTFGGGTKLEIKRAAAGDPAEPKSPDKTHTCPPCPAPELLGGPSVFLFPPKPKDTLMISRTPEVTCVVVDVSHEDPEVKFNWYVDGVEVHNAKTKPREEQYNSTYRVVSVLTVLHQDWLNGKEYKCKVSNKALPAPIEKTISKAKGQPREPQVYTLPPSREEMTKNQVSLTCLVKGFYPSDIAVEWESNGQPENNYKTTPPVLDSDGSFFLYSKLTVDKSRWQQGNVFSCSVMHEALHNHYTQKSLSLSPG

SEQ ID NO: 83 - protein, 553 aa, Artificial Sequence
  Description of Artificial Sequence: Synthetic polypeptide
MPPPRLLFFLLFLTPMEVRPEEPLVVKVEEGDNAVLQCLKGTSDGPTQQLTWSRESPLKPFLKLSLGLPGLGIHMRPLAIWLFIFNVSQQMGGFYLCQPGPPSEKAWQPGWTVNVEGSGELFRWNVSDLGGLGCGLKNRSSEGPSSPSGKLMSPKLYVWAKDRPEIWEGEPPCLPPRDSLNQSLSQDLTMAPGSTLWLSCGVPPDSVSRGPLSWTHVHPKGPKSLLSLELKDDRPARDMWVMETGLLLPRATAQDAGKYYCHRGNLTMSFHLEITARPGGGGSGGGGSGGGGSGGGGSMAQVKLQESGAELVKPGASVKMSCKASGYTFTSYNMHWVKQTPGQGLEWIGAIYPGNGDTSYNQKFKGKATLTADKSSSTAYMQLSSLTSEDSADYYCARSNYYGSSYWFFDVWGQGTTVTVSSGGGGSGGGGSGGGGSDIELTQSPTILSASPGEKVTMTCRASSSVNYMDWYQKKPGSSPKPWIYATSNLASGVPARFSGSGSGTSYSLTISRVEAEDAATYYCQQWSFNPPTFGGGTKLEIKRAAAHHHHHH

SEQ ID NO: 84 - protein, 782 aa, Artificial Sequence
  Description of Artificial Sequence: Synthetic polypeptide
MPPPRLLFFLLFLTPMEVRPEEPLVVKVEEGDNAVLQCLKGTSDGPTQQLTWSRESPLKPFLKLSLGLPGLGIHMRPLAIWLFIFNVSQQMGGFYLCQPGPPSEKAWQPGWTVNVEGSGELFRWNVSDLGGLGCGLKNRSSEGPSSPSGKLMSPKLYVWAKDRPEIWEGEPPCLPPRDSLNQSLSQDLTMAPGSTLWLSCGVPPDSVSRGPLSWTHVHPKGPKSLLSLELKDDRPARDMWVMETGLLLPRATAQDAGKYYCHRGNLTMSFHLEITARPGGGGSGGGGSGGGGSGGGGSDIELTQSPTILSASPGEKVTMTCRASSSVNYMDWYQKKPGSSPKPWIYATSNLASGVPARFSGSGSGTSYSLTISRVEAEDAATYYCQQWSFNPPTFGGGTKLEIKRGGGGSGGGGSGGGGSMAQVKLQESGAELVKPGASVKMSCKASGYTFTSYNMHWVKQTPGQGLEWIGAIYPGNGDTSYNQKFKGKATLTADKSSSTAYMQLSSLTSEDSADYYCARSNYYGSSYWFFDVWGQGTTVTVSSAAAGDPAEPKSPDKTHTCPPCPAPELLGGPSVFLFPPKPKDTLMISRTPEVTCVVVDVSHEDPEVKFNWYVDGVEVHNAKTKPREEQYNSTYRVVSVLTVLHQDWLNGKEYKCKVSNKALPAPIEKTISKAKGQPREPQVYTLPPSREEMTKNQVSLTCLVKGFYPSDIAVEWESNGQPENNYKTTPPVLDSDGSFFLYSKLTVDKSRWQQGNVFSCSVMHEALHNHYTQKSLSLSPG

SEQ ID NO: 85 - protein, 553 aa, Artificial Sequence
  Description of Artificial Sequence: Synthetic polypeptide
MPPPRLLFFLLFLTPMEVRPEEPLVVKVEEGDNAVLQCLKGTSDGPTQQLTWSRESPLKPFLKLSLGLPGLGIHMRPLAIWLFIFNVSQQMGGFYLCQPGPPSEKAWQPGWTVNVEGSGELFRWNVSDLGGLGCGLKNRSSEGPSSPSGKLMSPKLYVWAKDRPEIWEGEPPCLPPRDSLNQSLSQDLTMAPGSTLWLSCGVPPDSVSRGPLSWTHVHPKGPKSLLSLELKDDRPARDMWVMETGLLLPRATAQDAGKYYCHRGNLTMSFHLEITARPGGGGSGGGGSGGGGSGGGGSDIELTQSPTILSASPGEKVTMTCRASSSVNYMDWYQKKPGSSPKPWIYATSNLASGVPARFSGSGSGTSYSLTISRVEAEDAATYYCQQWSFNPPTFGGGTKLEIKRGGGGSGGGGSGGGGSMAQVKLQESGAELVKPGASVKMSCKASGYTFTSYNMHWVKQTPGQGLEWIGAIYPGNGDTSYNQKFKGKATLTADKSSSTAYMQLSSLTSEDSADYYCARSNYYGSSYWFFDVWGQGTTVTVSSAAAHHHHHH

SEQ ID NO: 86 - protein, 557 aa, Artificial Sequence
  Description of Artificial Sequence: Synthetic polypeptide
MPPPRLLFFLLFLTPMEVRPEEPLVVKVEEGDNAVLQCLKGTSDGPTQQLTWSRESPLKPFLKLSLGLPGLGIHMRPLAIWLFIFNVSQQMGGFYLCQPGPPSEKAWQPGWTVNVEGSGELFRWNVSDLGGLGCGLKNRSSEGPSSPSGKLMSPKLYVWAKDRPEIWEGEPPCLPPRDSLNQSLSQDLTMAPGSTLWLSCGVPPDSVSRGPLSWTHVHPKGPKSLLSLELKDDRPARDMWVMETGLLLPRATAQDAGKYYCHRGNLTMSFHLEITARPGGGGSGGGGSGGGGSGGGGSQVQLVQSGAEDKKPGESVKISCKASGYTFTNYGMNWVRQAPGQGLKWMGWINTYTGESTYADDFKGRFAFSLDTSASTAYLQLSSLRGEDTAVYFCARFAIKGDYWGQGTTVTVSSASTGGGGSGGGGSGGGGSGGGGSDIVMTQSPLSLEVSPGEPASISCRSTKSLLHSDGITYLYWYLQKPGQSPQLLIYQLSNLASGVPDRFSSSGSGTDFTLKISRVEAEDEGTYYCAQNLEIPRTFGQGTKLEIKRTHHHHHH

SEQ ID NO: 87 - protein, 552 aa, Artificial Sequence
  Description of Artificial Sequence: Synthetic polypeptide
MPPPRLLFFLLFLTPMEVRPEEPLVVKVEEGDNAVLQCLKGTSDGPTQQLTWSRESPLKPFLKLSLGLPGLGIHMRPLAIWLFIFNVSQQMGGFYLCQPGPPSEKAWQPGWTVNVEGSGELFRWNVSDLGGLGCGLKNRSSEGPSSPSGKLMSPKLYVWAKDRPEIWEGEPPCLPPRDSLNQSLSQDLTMAPGSTLWLSCGVPPDSVSRGPLSWTHVHPKGPKSLLSLELKDDRPARDMWVMETGLLLPRATAQDAGKYYCHRGNLTMSFHLEITARPGGGGSGGGGSGGGGSGGGGSQVQLVQSGAEDVKPDASVKLSCKASGYTFTDYYMHWVRQAPGQGLEWMGRVNPNRRGTTYNQKFEGRVTMTTDTSTSTAYMQLSSLRGEDTAVYYCARANWLDYWGQGTTVTVSSASTGGGGSGGGGSGGGGSGGGGSDIQMTQSPSSLEASVGDRVTITCSVSSSVSSIYLHWYQQKPGKSPKLLIYSTSNLASGVPDRFSGSGSGTDFTLTISSLQAEDEGTYYCQVYSGYPLTFGGGTKLEIKRTHHHHHH

SEQ ID NO: 88 - protein, 555 aa, Artificial Sequence
  Description of Artificial Sequence: Synthetic polypeptide
MPPPRLLFFLLFLTPMEVRPEEPLVVKVEEGDNAVLQCLKGTSDGPTQQLTWSRESPLKPFLKLSLGLPGLGIHMRPLAIWLFIFNVSQQMGGFYLCQPGPPSEKAWQPGWTVNVEGSGELFRWNVSDLGGLGCGLKNRSSEGPSSPSGKLMSPKLYVWAKDRPEIWEGEPPCLPPRDSLNQSLSQDLTMAPGSTLWLSCGVPPDSVSRGPLSWTHVHPKGPKSLLSLELKDDRPARDMWVMETGLLLPRATAQDAGKYYCHRGNLTMSFHLEITARPGGGGSGGGGSGGGGSGGGGSQVQLQESGPGDVKPSETLSLTCTVSGGSVSSGDYYWTWIRQSPGKGLEWIGHIYYSGNTNYNPSLKSRLTISIDTSKTTFSLQLSSVTGEDTAIYYCVRDRVTGAFDIWGQGTTVTVSSASTGGGGSGGGGSGGGGSGGGGSDIQMTQSPSSLEASVGDRVTITCQASQDISNYLNWYQQKPGKSPKLLIYDASNLETGVPDRFSGSGSGTDFTFTISSLQAEDEGTYFCQHFDHLPLAFGGGTKLEIKRTHHHHHH

SEQ ID NO: 89 - protein, 287 aa, Artificial Sequence
  Description of Artificial Sequence: Synthetic polypeptide
METDTLLLWVLLLWVPGSTGDIVLTQSPPSLAMSLGKRATISCRASESVTILGSHLIHWYQQKPGQPPTLLIQLASNVQTGVPARFSGSGSRTDFTLTIDPVEEDDVAVYYCLQSRTIPRTFGGGTKLEIKGSTSGSGKPGSGEGSTKGQIQLVQSGPELKKPGETVKISCKASGYTFTDYSINWVKRAPGKGLKWMGWINTETREPAYAYDFRGRFAFSLETSASTAYLQINNLKYEDTATYFCALDYSYAMDYWGQGTSVTVSSGGGGSGGGGSGGGGSHHHHHH

SEQ ID NO: 90 - protein, 286 aa, Artificial Sequence
  Description of Artificial Sequence: Synthetic polypeptide
MEFGLSWVFLVALFRGVQCQIQLVQSGPELKKPGETVKISCKASGYTFTDYSINWVKRAPGKGLKWMGWINTETREPAYAYDFRGRFAFSLETSASTAYLQINNLKYEDTATYFCALDYSYAMDYWGQGTSVTVSSGSTSGSGKPGSGEGSTKGDIVLTQSPPSLAMSLGKRATISCRASESVTILGSHLIHWYQQKPGQPPTLLIQLASNVQTGVPARFSGSGSRTDFTLTIDPVEEDDVAVYYCLQSRTIPRTFGGGTKLEIKGGGGSGGGGSGGGGSHHHHHH

SEQ ID NO: 91 - protein, 565 aa, Artificial Sequence
  Description of Artificial Sequence: Synthetic polypeptide
MPPPRLLFFLLFLTPMEVRPEEPLVVKVEEGDNAVLQCLKGTSDGPTQQLTWSRESPLKPFLKLSLGLPGLGIHMRPLAIWLFIFNVSQQMGGFYLCQPGPPSEKAWQPGWTVNVEGSGELFRWNVSDLGGLGCGLKNRSSEGPSSPSGKLMSPKLYVWAKDRPEIWEGEPPCLPPRDSLNQSLSQDLTMAPGSTLWLSCGVPPDSVSRGPLSWTHVHPKGPKSLLSLELKDDRPARDMWVMETGLLLPRATAQDAGKYYCHRGNLTMSFHLEITARPGGGGSGGGGSGGGGSGGGGSDIVLTQSPPSLAMSLGKRATISCRASESVTILGSHLIHWYQQKPGQPPTLLIQLASNVQTGVPARFSGSGSRTDFTLTIDPVEEDDVAVYYCLQSRTIPRTFGGGTKLEIKGSTSGSGKPGSGEGSTKGQIQLVQSGPELKKPGETVKISCKASGYTFTDYSINWVKRAPGKGLKWMGWINTETREPAYAYDFRGRFAFSLETSASTAYLQINNLKYEDTATYFCALDYSYAMDYWGQGTSVTVSSGGGGSGGGGSGGGGSHHHHHH

SEQ ID NO: 92 - protein, 565 aa, Artificial Sequence
  Description of Artificial Sequence: Synthetic polypeptide
MPPPRLLFFLLFLTPMEVRPEEPLVVKVEEGDNAVLQCLKGTSDGPTQQLTWSRESPLKPFLKLSLGLPGLGIHMRPLAIWLFIFNVSQQMGGFYLCQPGPPSEKAWQPGWTVNVEGSGELFRWNVSDLGGLGCGLKNRSSEGPSSPSGKLMSPKLYVWAKDRPEIWEGEPPCLPPRDSLNQSLSQDLTMAPGSTLWLSCGVPPDSVSRGPLSWTHVHPKGPKSLLSLELKDDRPARDMWVMETGLLLPRATAQDAGKYYCHRGNLTMSFHLEITARPGGGGSGGGGSGGGGSGGGGSQIQLVQSGPELKKPGETVKISCKASGYTFTDYSINWVKRAPGKGLKWMGWINTETREPAYAYDFRGRFAFSLETSASTAYLQINNLKYEDTATYFCALDYSYAMDYWGQGTSVTVSSGSTSGSGKPGSGEGSTKGDIVLTQSPPSLAMSLGKRATISCRASESVTILGSHLIHWYQQKPGQPPTLLIQLASNVQTGVPARFSGSGSRTDFTLTIDPVEEDDVAVYYCLQSRTIPRTFGGGTKLEIKGGGGSGGGGSGGGGSHHHHHH

SEQ ID NO: 93 - protein, 771 aa, Artificial Sequence
  Description of Artificial Sequence: Synthetic polypeptide
MPPPRLLFFLLFLTPMEVRPEEPLVVKVEEGDNAVLQCLKGTSDGPTQQLTWSRESPLKPFLKLSLGLPGLGIHMRPLAIWLFIFNVSQQMGGFYLCQPGPPSEKAWQPGWTVNVEGSGELFRWNVSDLGGLGCGLKNRSSEGPSSPSGKLMSPKLYVWAKDRPEIWEGEPPCLPPRDSLNQSLSQDLTMAPGSTLWLSCGVPPDSVSRGPLSWTHVHPKGPKSLLSLELKDDRPARDMWVMETGLLLPRATAQDAGKYYCHRGNLTMSFHLEITARPDKTHTCPPCPAPELLGGPSVFLFPPKPKDTLMISRTPEVTCVVVDVSHEDPEVKFNWYVDGVEVHNAKTKPREEQYNSTYRVVSVLTVLHQDWLNGKEYKCKVSNKALPAPIEKTISKAKGQPREPQVYTLPPSREEMTKNQVSLTCLVKGFYPSDIAVEWESNGQPENNYKTTPPVLDSDGSFFLYSKLTVDKSRWQQGNVFSCSVMHEALHNHYTQKSLSLSPGGGGGSGGGGSGGGGSGGGGSEVQLVESGGGLVQPGGSLRLSCAASGFNIKDTYIHWVRQAPGKGLEWVARIYPTNGYTRYADSVKGRFTISADTSKNTAYLQMNSLRAEDTAVYYCSRWGGDGFYAMDYWGQGTLVTVSSASTGGGGSGGGGSGGGGSDIQMTQSPSSLSASVGDRVTITCRASQDVNTAVAWYQQKPGKAPKLLIYSASFLYSGVPSRFSGSRSGTDFTLTISSLQPEDFATYYCQQHYTTPPTFGQGTKVEIKRT

SEQ ID NO: 94 - protein, 827 aa, Artificial Sequence
  Description of Artificial Sequence: Synthetic polypeptide
MPPPRLLFFLLFLTPMEVRPEEPLVVKVEEGDNAVLQCLKGTSDGPTQQLTWSRESPLKPFLKLSLGLPGLGIHMRPLAIWLFIFNVSQQMGGFYLCQPGPPSEKAWQPGWTVNVEGSGELFRWNVSDLGGLGCGLKNRSSEGPSSPSGKLMSPKLYVWAKDRPEIWEGEPPCLPPRDSLNQSLSQDLTMAPGSTLWLSCGVPPDSVSRGPLSWTHVHPKGPKSLLSLELKDDRPARDMWVMETGLLLPRATAQDAGKYYCHRGNLTMSFHLEITARPGGGGSGGGGSGGGGSGGGGSEVQLVESGGGLVQPGGSLRLSCAASGFNIKDTYIHWVRQAPGKGLEWVARIYPTNGYTRYADSVKGRFTISADTSKNTAYLQMNSLRAEDTAVYYCSRWGGDGFYAMDYWGQGTLVTVSSASTGGGGSGGGGSGGGGSDIQMTQSPSSLSASVGDRVTITCRASQDVNTAVAWYQQKPGKAPKLLIYSASFLYSGVPSRFSGSRSGTDFTLTISSLQPEDFATYYCQQHYTTPPTFGQGTKVEIKRTGGGGSGGGGSGGGGSGGGGSQVQLQESGPGDVKPSETLSLTCTVSGGSVSSGDYYWTWIRQSPGKGLEWIGHIYYSGNTNYNPSLKSRLTISIDTSKTTFSLQLSSVTGEDTAIYYCVRDRVTGAFDIWGQGTTVTVSSASTGGGGSGGGGSGGGGSGGGGSDIQMTQSPSSLEASVGDRVTITCQASQDISNYLNWYQQKPGKSPKLLIYDASNLETGVPDRFSGSGSGTDFTFTISSLQAEDEGTYFCQHFDHLPLAFGGGTKLEIKRTGGGGSHHHHHH

SEQ ID NO: 95 - protein, 827 aa, Artificial Sequence
  Description of Artificial Sequence: Synthetic polypeptide
MPPPRLLFFLLFLTPMEVRPEEPLVVKVEEGDNAVLQCLKGTSDGPTQQLTWSRESPLKPFLKLSLGLPGLGIHMRPLAIWLFIFNVSQQMGGFYLCQPGPPSEKAWQPGWTVNVEGSGELFRWNVSDLGGLGCGLKNRSSEGPSSPSGKLMSPKLYVWAKDRPEIWEGEPPCLPPRDSLNQSLSQDLTMAPGSTLWLSCGVPPDSVSRGPLSWTHVHPKGPKSLLSLELKDDRPARDMWVMETGLLLPRATAQDAGKYYCHRGNLTMSFHLEITARPGGGGSGGGGSGGGGSGGGGSEVQLVESGGGLVQPGGSLRLSCAASGFNIKDTYIHWVRQAPGKGLEWVARIYPTNGYTRYADSVKGRFTISADTSKNTAYLQMNSLRAEDTAVYYCSRWGGDGFYAMDYWGQGTLVTVSSASTGGGGSGGGGSGGGGSDIQMTQSPSSLSASVGDRVTITCRASQDVNTAVAWYQQKPGKAPKLLIYSASFLYSGVPSRFSGSRSGTDFTLTISSLQPEDFATYYCQQHYTTPPTFGQGTKVEIKRTGGGGSGGGGSGGGGSGGGGSDIQMTQSPSSLEASVGDRVTITCQASQDISNYLNWYQQKPGKSPKLLIYDASNLETGVPDRFSGSGSGTDFTFTISSLQAEDEGTYFCQHFDHLPLAFGGGTKLEIKRTGGGGSGGGGSGGGGSGGGGSQVQLQESGPGDVKPSETLSLTCTVSGGSVSSGDYYWTWIRQSPGKGLEWIGHIYYSGNTNYNPSLKSRLTISIDTSKTTFSLQLSSVTGEDTAIYYCVRDRVTGAFDIWGQGTTVTVSSASTGGGGSHHHHHH

SEQ ID NO: 96 - protein, 548 aa, Artificial Sequence
  Description of Artificial Sequence: Synthetic polypeptide
MEFGLSWVFLVALFRGVQCEVQLVESGGGLVQPGGSLRLSCAASGFNIKDTYIHWVRQAPGKGLEWVARIYPTNGYTRYADSVKGRFTISADTSKNTAYLQMNSLRAEDTAVYYCSRWGGDGFYAMDYWGQGTLVTVSSASTGGGGSGGGGSGGGGSDIQMTQSPSSLSASVGDRVTITCRASQDVNTAVAWYQQKPGKAPKLLIYSASFLYSGVPSRFSGSRSGTDFTLTISSLQPEDFATYYCQQHYTTPPTFGQGTKVEIKRTGGGGSGGGGSGGGGSGGGGSQVQLQESGPGDVKPSETLSLTCTVSGGSVSSGDYYWTWIRQSPGKGLEWIGHIYYSGNTNYNPSLKSRLTISIDTSKTTFSLQLSSVTGEDTAIYYCVRDRVTGAFDIWGQGTTVTVSSASTGGGGSGGGGSGGGGSGGGGSDIQMTQSPSSLEASVGDRVTITCQASQDISNYLNWYQQKPGKSPKLLIYDASNLETGVPDRFSGSGSGTDFTFTISSLQAEDEGTYFCQHFDHLPLAFGGGTKLEIKRTGGGGSHHHHHH

SEQ ID NO: 97 - protein, 548 aa, Artificial Sequence
  Description of Artificial Sequence: Synthetic polypeptide
MEFGLSWVFLVALFRGVQCEVQLVESGGGLVQPGGSLRLSCAASGFNIKDTYIHWVRQAPGKGLEWVARIYPTNGYTRYADSVKGRFTISADTSKNTAYLQMNSLRAEDTAVYYCSRWGGDGFYAMDYWGQGTLVTVSSASTGGGGSGGGGSGGGGSDIQMTQSPSSLSASVGDRVTITCRASQDVNTAVAWYQQKPGKAPKLLIYSASFLYSGVPSRFSGSRSGTDFTLTISSLQPEDFATYYCQQHYTTPPTFGQGTKVEIKRTGGGGSGGGGSGGGGSGGGGSDIQMTQSPSSLEASVGDRVTITCQASQDISNYLNWYQQKPGKSPKLLIYDASNLETGVPDRFSGSGSGTDFTFTISSLQAEDEGTYFCQHFDHLPLAFGGGTKLEIKRTGGGGSGGGGSGGGGSGGGGSQVQLQESGPGDVKPSETLSLTCTVSGGSVSSGDYYWTWIRQSPGKGLEWIGHIYYSGNTNYNPSLKSRLTISIDTSKTTFSLQLSSVTGEDTAIYYCVRDRVTGAFDIWGQGTTVTVSSASTGGGGSHHHHHH

SEQ ID NO: 98 - protein, 551 aa, Artificial Sequence; identical to SEQ ID NO: 73
  Description of Artificial Sequence: Synthetic polypeptide

SEQ ID NO: 99 - protein, 505 aa, Artificial Sequence; identical to SEQ ID NO: 78
  Description of Artificial Sequence: Synthetic polypeptide

SEQ ID NO: 100 - protein, 276 aa, Artificial Sequence; identical to SEQ ID NO: 79
  Description of Artificial Sequence: Synthetic polypeptide

SEQ ID NO: 101 - protein, 505 aa, Artificial Sequence; identical to SEQ ID NO: 80
  Description of Artificial Sequence: Synthetic polypeptide

SEQ ID NO: 102 - protein, 276 aa, Artificial Sequence; identical to SEQ ID NO: 81
  Description of Artificial Sequence: Synthetic polypeptide

SEQ ID NO: 103 - protein, 492 aa, Artificial Sequence
  Description of Artificial Sequence: Synthetic polypeptide
MEFGLSWVFLVALFRGVQCEVQLVESGGGLVQPGGSLRLSCAASGFNIKDTYIHWVRQAPGKGLEWVARIYPTNGYTRYADSVKGRFTISADTSKNTAYLQMNSLRAEDTAVYYCSRWGGDGFYAMDYWGQGTLVTVSSASTGGGGSGGGGSGGGGSDIQMTQSPSSLSASVGDRVTITCRASQDVNTAVAWYQQKPGKAPKLLIYSASFLYSGVPSRFSGSRSGTDFTLTISSLQPEDFATYYCQQHYTTPPTFGQGTKVEIKRTDKTHTCPPCPAPELLGGPSVFLFPPKPKDTLMISRTPEVTCVVVDVSHEDPEVKFNWYVDGVEVHNAKTKPREEQYNSTYRVVSVLTVLHQDWLNGKEYKCKVSNKALPAPIEKTISKAKGQPREPQVYTLPPSREEMTKNQVSLTCLVKGFYPSDIAVEWESNGQPENNYKTTPPVLDSDGSFFLYSKLTVDKSRWQQGNVFSCSVMHEALHNHYTQKSLSLSPG

SEQ ID NO: 104 - protein, 797 aa, Artificial Sequence
  Description of Artificial Sequence: Synthetic polypeptide
MPPPRLLFFLLFLTPMEVRPEEPLVVKVEEGDNAVLQCLKGTSDGPTQQLTWSRESPLKPFLKLSLGLPGLGIHMRPLAIWLFIFNVSQQMGGFYLCQPGPPSEKAWQPGWTVNVEGSGELFRWNVSDLGGLGCGLKNRSSEGPSSPSGKLMSPKLYVWAKDRPEIWEGEPPCLPPRDSLNQSLSQDLTMAPGSTLWLSCGVPPDSVSRGPLSWTHVHPKGPKSLLSLELKDDRPARDMWVMETGLLLPRATAQDAGKYYCHRGNLTMSFHLEITARPGGGGSGGGGSGGGGSGGGGSGGGGSGGGGSGGGGSMAQVKLQESGAELVKPGASVKMSCKASGYTFTSYNMHWVKQTPGQGLEWIGAIYPGNGDTSYNQKFKGKATLTADKSSSTAYMQLSSLTSEDSADYYCARSNYYGSSYWFFDVWGQGTTVTVSSGGGGSGGGGSGGGGSDIELTQSPTILSASPGEKVTMTCRASSSVNYMDWYQKKPGSSPKPWIYATSNLASGVPARFSGSGSGTSYSLTISRVEAEDAATYYCQQWSFNPPTFGGGTKLEIKRAAAGDPAEPKSPDKTHTCPPCPAPELLGGPSVFLFPPKPKDTLMISRTPEVTCVVVDVSHEDPEVKFNWYVDGVEVHNAKTKPREEQYNSTYRVVSVLTVLHQDWLNGKEYKCKVSNKALPAPIEKTISKAKGQPREPQVYTLPPSREEMTKNQVSLTCLVKGFYPSDIAVEWESNGQPENNYKTTPPVLDSDGSFFLYSKLTVDKSRWQQGNVFSCSVMHEALHNHYTQKSLSLSPG

SEQ ID NO: 105 - protein, 568 aa, Artificial Sequence
  Description of Artificial Sequence: Synthetic polypeptide
MPPPRLLFFLLFLTPMEVRPEEPLVVKVEEGDNAVLQCLKGTSDGPTQQLTWSRESPLKPFLKLSLGLPGLGIHMRPLAIWLFIFNVSQQMGGFYLCQPGPPSEKAWQPGWTVNVEGSGELFRWNVSDLGGLGCGLKNRSSEGPSSPSGKLMSPKLYVWAKDRPEIWEGEPPCLPPRDSLNQSLSQDLTMAPGSTLWLSCGVPPDSVSRGPLSWTHVHPKGPKSLLSLELKDDRPARDMWVMETGLLLPRATAQDAGKYYCHRGNLTMSFHLEITARPGGGGSGGGGSGGGGSGGGGSGGGGSGGGGSGGGGSMAQVKLQESGAELVKPGASVKMSCKASGYTFTSYNMHWVKQTPGQGLEWIGAIYPGNGDTSYNQKFKGKATLTADKSSSTAYMQLSSLTSEDSADYYCARSNYYGSSYWFFDVWGQGTTVTVSSGGGGSGGGGSGGGGSDIELTQSPTILSASPGEKVTMTCRASSSVNYMDWYQKKPGSSPKPWIYATSNLASGVPARFSGSGSGTSYSLTISRVEAEDAATYYCQQWSFNPPTFGGGTKLEIKRAAAHHHHHH

SEQ ID NO: 106 - protein, 779 aa, Artificial Sequence
  Description of Artificial Sequence: Synthetic polypeptide
MPPPRLLFFLLFLTPMEVRPEEPLVVKVEEGDNAVLQCLKGTSDGPTQQLTWSRESPLKPFLKLSLGLPGLGIHMRPLAIWLFIFNVSQQMGGFYLCQPGPPSEKAWQPGWTVNVEGSGELFRWNVSDLGGLGCGLKNRSSEGPSSPSGKLMSPKLYVWAKDRPEIWEGEPPCLPPRDSLNQSLSQDLTMAPGSTLWLSCGVPPDSVSRGPLSWTHVHPKGPKSLLSLELKDDRPARDMWVMETGLLLPRATAQDAGKYYCHRGNLTMSFHLEITARPDPAEPKSPDKTHTCPPCPAPELLGGPSVFLFPPKPKDTLMISRTPEVTCVVVDVSHEDPEVKFNWYVDGVEVHNAKTKPREEQYNSTYRVVSVLTVLHQDWLNGKEYKCKVSNKALPAPIEKTISKAKGQPREPQVYTLPPSREEMTKNQVSLTCLVKGFYPSDIAVEWESNGQPENNYKTTPPVLDSDGSFFLYSKLTVDKSRWQQGNVFSCSVMHEALHNHYTQKSLSLSPGGGGGSGGGGSGGGGSGGGGSMAQVKLQESGAELVKPGASVKMSCKASGYTFTSYNMHWVKQTPGQGLEWIGAIYPGNGDTSYNQKFKGKATLTADKSSSTAYMQLSSLTSEDSADYYCARSNYYGSSYWFFDVWGQGTTVTVSSGGGGSGGGGSGGGGSDIELTQSPTILSASPGEKVTMTCRASSSVNYMDWYQKKPGSSPKPWIYATSNLASGVPARFSGSGSGTSYSLTISRVEAEDAATYYCQQWSFNPPTFGGGTKLEIKRA

SEQ ID NO: 107 - protein, 783 aa, Artificial Sequence
  Description of Artificial Sequence: Synthetic polypeptide
MDFQVQIFSFLLISASVIMSRMAQVKLQESGAELVKPGASVKMSCKASGYTFTSYNMHWVKQTPGQGLEWIGAIYPGNGDTSYNQKFKGKATLTADKSSSTAYMQLSSLTSEDSADYYCARSNYYGSSYWFFDVWGQGTTVTVSSGGGGSGGGGSGGGGSDIELTQSPTILSASPGEKVTMTCRASSSVNYMDWYQKKPGSSPKPWIYATSNLASGVPARFSGSGSGTSYSLTISRVEAEDAATYYCQQWSFNPPTFGGGTKLEIKRAAAGGGGSGGGGSGGGGSGGGGSPEEPLVVKVEEGDNAVLQCLKGTSDGPTQQLTWSRESPLKPFLKLSLGLPGLGIHMRPLAIWLFIFNVSQQMGGFYLCQPGPPSEKAWQPGWTVNVEGSGELFRWNVSDLGGLGCGLKNRSSEGPSSPSGKLMSPKLYVWAKDRPEIWEGEPPCLPPRDSLNQSLSQDLTMAPGSTLWLSCGVPPDSVSRGPLSWTHVHPKGPKSLLSLELKDDRPARDMWVMETGLLLPRATAQDAGKYYCHRGNLTMSFHLEITARPDPAEPKSPDKTHTCPPCPAPELLGGPSVFLFPPKPKDTLMISRTPEVTCVVVDVSHEDPEVKFNWYVDGVEVHNAKTKPREEQYNSTYRVVSVLTVLHQDWLNGKEYKCKVSNKALPAPIEKTISKAKGQPREPQVYTLPPSREEMTKNQVSLTCLVKGFYPSDIAVEWESNGQPENNYKTTPPVLDSDGSFFLYSKLTVDKSRWQQGNVFSCSVMHEALHNHYTQKSLSLSPG

SEQ ID NO: 108 - protein, 1106 aa, Artificial Sequence
  Description of Artificial Sequence: Synthetic polypeptide
MLRLLLALNLFPSIQVTGDIQMTQTTSSLSASLGDRVTISCRASQDISKYLNWYQQKPDGTVKLLIYHTSRLHSGVPSRFSGSGSGTDYSLTISNLEQEDIATYFCQQGNTLPYTFGGGTKLEITGGGGSGGGGSGGGGSGGGGSEVKLQESGPGLVAPSQSLSVTCTVSGVSLPDYGVSWIRQPPRKGLEWLGVIWGSETTYYNSALKSRLTIIKDNSKSQVFLKMNSLQTDDTAIYYCAKHYYYGGSYAMDYWGQGTSVTVSSDYKDDDDKIEVMYPPPYLDNEKSNGTIIHVKGKHLCPSPLFPGPSKPFWVLVVVGGVLACYSLLVTVAFIIFWVRSKRSRLLHSDYMNMTPRRPGPTRKHYQPYAPPRDFAAYRSKRGRKKLLYIFKQPFMRPVQTTQEEDGCSCRFPEEEEGGCELRVKFSRSADAPAYQQGQNQLYNELNLGRREEYDVLDKRRGRDPEMGGKPQRRKNPQEGLYNELQKDKMAEAYSEIGMKGERRRGKGHDGLYQGLSTATKDTYDALHMQALPPREGRGSLLTCGDVEENPGPMPPPRLLFFLLFLTPMEVRPEEPLVVKVEEGDNAVLQCLKGTSDGPTQQLTWSRESPLKPFLKLSLGLPGLGIHMRPLAIWLFIFNVSQQMGGFYLCQPGPPSEKAWQPGWTVNVEGSGELFRWNVSDLGGLGCGLKNRSSEGPSSPSGKLMSPKLYVWAKDRPEIWEGEPPCLPPRDSLNQSLSQDLTMAPGSTLWLSCGVPPDSVSRGPLSWTHVHPKGPKSLLSLELKDDRPARDMWVMETGLLLPRATAQDAGKYYCHRGNLTMSFHLEITARPGGGGSGGGGSGGGGSGGGGSEVQLVESGGGLVQPGGSLRLSCAASGFNIKDTYIHWVRQAPGKGLEWVARIYPTNGYTRYADSVKGRFTISADTSKNTAYLQMNSLRAEDTAVYYCSRWGGDGFYAMDYWGQGTLVTVSSASTGGGGSGGGGSGGGGSDIQMTQSPSSLSASVGDRVTITCRASQDVNTAVAWYQQKPGKAPKLLIYSASFLYSGVPSRFSGSRSGTDFTLTISSLQPEDFATYYCQQHYTTPPTFGQGTKVEIKRTSRHHHHHH

SEQ ID NO: 109 - protein, 1106 aa, Artificial Sequence
  Description of Artificial Sequence: Synthetic polypeptide
MPPPRLLFFLLFLTPMEVRPEEPLVVKVEEGDNAVLQCLKGTSDGPTQQLTWSRESPLKPFLKLSLGLPGLGIHMRPLAIWLFIFNVSQQMGGFYLCQPGPPSEKAWQPGWTVNVEGSGELFRWNVSDLGGLGCGLKNRSSEGPSSPSGKLMSPKLYVWAKDRPEIWEGEPPCLPPRDSLNQSLSQDLTMAPGSTLWLSCGVPPDSVSRGPLSWTHVHPKGPKSLLSLELKDDRPARDMWVMETGLLLPRATAQDAGKYYCHRGNLTMSFHLEITARPGGGGSGGGGSGGGGSGGGGSEVQLVESGGGLVQPGGSLRLSCAASGFNIKDTYIHWVRQAPGKGLEWVARIYPTNGYTRYADSVKGRFTISADTSKNTAYLQMNSLRAEDTAVYYCSRWGGDGFYAMDYWGQGTLVTVSSASTGGGGSGGGGSGGGGSDIQMTQSPSSLSASVGDRVTITCRASQDVNTAVAWYQQKPGKAPKLLIYSASFLYSGVPSRFSGSRSGTDFTLTISSLQPEDFATYYCQQHYTTPPTFGQGTKVEIKRTSRHHHHHHEGRGSLLTCGDVEENPGPMLRLLLALNLFPSIQVTGDIQMTQTTSSLSASLGDRVTISCRASQDISKYLNWYQQKPDGTVKLLIYHTSRLHSGVPSRFSGSGSGTDYSLTISNLEQEDIATYFCQQGNTLPYTFGGGTKLEITGGGGSGGGGSGGGGSGGGGSEVKLQESGPGLVAPSQSLSVTCTVSGVSLPDYGVSWIRQPPRKGLEWLGVIWGSETTYYNSALKSRLTIIKDNSKSQVFLKMNSLQTDDTAIYYCAKHYYYGGSYAMDYWGQGTSVTVSSDYKDDDDKIEVMYPPPYLDNEKSNGTIIHVKGKHLCPSPLFPGPSKPFWVLVVVGGVLACYSLLVTVAFIIFWVRSKRSRLLHSDYMNMTPRRPGPTRKHYQPYAPPRDFAAYRSKRGRKKLLYIFKQPFMRPVQTTQEEDGCSCRFPEEEEGGCELRVKFSRSADAPAYQQGQNQLYNELNLGRREEYDVLDKRRGRDPEMGGKPQRRKNPQEGLYNELQKDKMAEAYSEIGMKGERRRGKGHDGLYQGLSTATKDTYDALHMQALPPR

SEQ ID NO: 110 - protein, 551 aa, Artificial Sequence; identical to SEQ ID NO: 73
  Description of Artificial Sequence: Synthetic polypeptide

SEQ ID NO: 111 - protein, 551 aa, Artificial Sequence; identical to SEQ ID NO: 73
  Description of Artificial Sequence: Synthetic polypeptide

SEQ ID NO: 112 - protein, 291 aa, Artificial Sequence
  Description of Artificial Sequence: Synthetic polypeptide
MPPPRLLFFLLFLTPMEVRPEEPLVVKVEEGDNAVLQCLKGTSDGPTQQLTWSRESPLKPFLKLSLGLPGLGIHMRPLAIWLFIFNVSQQMGGFYLCQPGPPSEKAWQPGWTVNVEGSGELFRWNVSDLGGLGCGLKNRSSEGPSSPSGKLMSPKLYVWAKDRPEIWEGEPPCLPPRDSLNQSLSQDLTMAPGSTLWLSCGVPPDSVSRGPLSWTHVHPKGPKSLLSLELKDDRPARDMWVMETGLLLPRATAQDAGKYYCHRGNLTMSFHLEITARPVLWHWLLRTGGWK

SEQ ID NO: 113 - protein, 535 aa, Artificial Sequence; identical to SEQ ID NO: 71
  Description of Artificial Sequence: Synthetic polypeptide

SEQ ID NO: 114 - protein, 527 aa, Artificial Sequence
  Description of Artificial Sequence: Synthetic polypeptide
MLRLLLALNLFPSIQVTGDIQMTQTTSSLSASLGDRVTISCRASQDISKYLNWYQQKPDGTVKLLIYHTSRLHSGVPSRFSGSGSGTDYSLTISNLEQEDIATYFCQQGNTLPYTFGGGTKLEITGGGGSGGGGSGGGGSGGGGSEVKLQESGPGLVAPSQSLSVTCTVSGVSLPDYGVSWIRQPPRKGLEWLGVIWGSETTYYNSALKSRLTIIKDNSKSQVFLKMNSLQTDDTAIYYCAKHYYYGGSYAMDYWGQGTSVTVSSIEVMYPPPYLDNEKSNGTIIHVKGKHLCPSPLFPGPSKPFWVLVVVGGVLACYSLLVTVAFIIFWVRSKRSRLLHSDYMNMTPRRPGPTRKHYQPYAPPRDFAAYRSKRGRKKLLYIFKQPFMRPVQTTQEEDGCSCRFPEEEEGGCELRVKFSRSADAPAYQQGQNQLYNELNLGRREEYDVLDKRRGRDPEMGGKPQRRKNPQEGLYNELQKDKMAEAYSEIGMKGERRRGKGHDGLYQGLSTATKDTYDALHMQALPPR

SEQ ID NO: 115 - protein, 466 aa, Artificial Sequence
  Description of Artificial Sequence: Synthetic polypeptide
MEKDTLLLWVLLLWVPGSTGEVKLVESGGGLVQPGGSLKLSCAASGFDFSRYWMSWVRQAPGKGLEWIGEINLDSSTINYTPSLKDKFIISRDNAKNTLYLQMSKVRSEDTALYYCARRYDAMDYWGQGTSVTVSSAKTTAPSVYPLAPVCGDTTGSSVTLGCLVKGYFPEPVTLTWNSGSLSSGVHTFPAVLQSDLYTLSSSVTVTSSTWPSQSITCNVAHPASSTKVDKKIEPRGPTIKPCPPCKCPAPNLLGGPSVFIFPPKIKDVLMISLSPIVTCVVVDVSEDDPDVQISWFVNNVEVHTAQTQTHREDYNSTLRVVSALPIQHQDWMSGKEFKCKVNNKDLPAPIERTISKPKGSVRAPQVYVLPPPEEEMTKKQVTLTCMVTDFMPEDIYVEWTNNGKTELNYKNTEPVLDSDGSYFMYSKLRVEKKNWVERNSYSCSVVHEGLHNHHTTKSFSRTPGK

SEQ ID NO: 116 - protein, 236 aa, Artificial Sequence
  Description of Artificial Sequence: Synthetic polypeptide
MDFGLIFFIVALLKGVQCDIVLTQSPASLAVSLGQRATISCRASESVDDYGISFMNWFQQKPGQPPKLLIYAAPNQGSGVPARFSGSGSGTDFSLNIHPMEEDDTAMYFCQQSKDVRWTFGGGTKLEIKRADAAPTVSIFPPSSEQLTSGGASVVCFLNNFYPKDINVKWKIDGSERQNGVLNSWTDQDSKDSTYSMSSTLTLTKDEYERHNSYTCEATHKTSTSPIVKSFNRNEC

SEQ ID NO: 117 - protein, 548 aa, Artificial Sequence
  Description of Artificial Sequence: Synthetic polypeptide
MEKDTLLLWVLLLWVPGSTGEVKLVESGGGLVQPGGSLKLSCAASGFDFSRYWMSWVRQAPGKGLEWIGEINLDSSTINYTPSLKDKFIISRDNAKNTLYLQMSKVRSEDTALYYCARRYDAMDYWGQGTSVTVSSASTGGGGSGGGGSGGGGSGGGGSDIVLTQSPASLAVSQGQRATISCRASESVDDYGISFMNWFQQKPGQPPKLLIYAAPNQGSGVPARFSGSGSGTDFSLNIHPMEEDDTATYFCQQSKDVRWTFGGGTKLEIKRGGGGSGGGGSGGGGSGGGGSEVQLVESGGGLVQPGGSLRLSCAASGFNIKDTYIHWVRQAPGKGLEWVARIYPTNGYTRYADSVKGRFTISADTSKNTAYLQMNSLRAEDTAVYYCSRWGGDGFYAMDYWGQGTLVTVSSASTGGGGSGGGGSGGGGSDIQMTQSPSSLSASVGDRVTITCRASQDVNTAVAWYQQKPGKAPKLLIYSASFLYSGVPSRFSGSRSGTDFTLTISSLQPEDFATYYCQQHYTTPPTFGQGTKVEIKRTSRGPHHHHHH

SEQ ID NO: 118 - protein, 543 aa, Artificial Sequence
  Description of Artificial Sequence: Synthetic polypeptide
MDFGLIFFIVALLKGVQCDIVLTQSPASLAVSQGQRATISCRASESVDDYGISFMNWFQQKPGQPPKLLIYAAPNQGSGVPARFSGSGSGTDFSLNIHPMEEDDTATYFCQQSKDVRWTFGGGTKLEIKRGGGGSGGGGSGGGGSGGGGSEVKLVESGGGLVQPGGSLKLSCAASGFDFSRYWMSWVRQAPGKGLEWIGEINLDSSTINYTPSLKDKFIISRDNAKNTLYLQMSKVRSEDTALYYCARRYDAMDYWGQGTSVTVSSGGGGSGGGGSGGGGSGGGGSEVQLVESGGGLVQPGGSLRLSCAASGFNIKDTYIHWVRQAPGKGLEWVARIYPTNGYTRYADSVKGRFTISADTSKNTAYLQMNSLRAEDTAVYYCSRWGGDGFYAMDYWGQGTLVTVSSASTGGGGSGGGGSGGGGSDIQMTQSPSSLSASVGDRVTITCRASQDVNTAVAWYQQKPGKAPKLLIYSASFLYSGVPSRFSGSRSGTDFTLTISSLQPEDFATYYCQQHYTTPPTFGQGTKVEIKRTSRGPHHHHHH

SEQ ID NO: 119-200 - skipped (82 entries)

SEQ ID NO: 201 - DNA, 1389 bp, Artificial Sequence
  Description of Artificial Sequence: Synthetic polynucleotide
atggagtttgggctgagctgggttttcctcgttgctctttttagaggtgtccagtgtcaggtgcagctgcaggagtcgggcccaggactggtgaagccttcggagaccctgtccctcacctgcactgtctctggtggctccgtcagcagtggtgattactactggacctggatccggcagtccccagggaagggactggagtggattggacacatctattacagtgggaacaccaattataacccctccctcaagagtcgactcaccatatcaattgacacgtccaagactcagttctccctgaagctgagttctgtgaccgctgcggacacggccatttattactgtgtgcgagatcgagtgactggtgcttttgatatctggggccaagggacaatggtcaccgtctcttcagcctccaccaagggcccatcggtcttccccctggcgccctgctccaggagcacctccgagagcacagcggccctgggctgcctggtcaaggactacttccctgaaccggtgacggtgtcgtggaactcaggcgctctgaccagcggcgtgcacaccttcccggctgtcctacagtcctcaggactctactccctcagcagcgtggtgaccgtgccctccagcaacttcggcacccagacctacacctgcaacgtagatcacaagcccagcaataccaaggtggacaagacagttgagcgcaaatgttgtgtcgagtgcccaccgtgcccagcaccacctgtggcaggaccgtcagtcttcctcttccccccaaaacccaaggacaccctcatgatctcccggacccctgaggtcacgtgcgtggtggtggacgtgagccacgaagaccccgaggtccagttcaactggtacgtggacggcgtggaggtgcataatgccaagacaaagccacgggaggagcagttccaaagcacgttccgtgtggtcagcgtcctcaccgtcgtgcaccaggactggctgaacggcaaggagtacaagtgcaaggtctccaacaaaggcctcccagcccccatcgagaaaaccatctccaaaaccaaagggcagccccgagaaccacaggtgtacaccctgcccccatcccgggaggagatgaccaagaaccaggtcagcctgacctgcctggtcaaaggcttctaccccagcgacatcgccgtggagtgggagagcaatgggcagccggagaacaactacaagaccacgcctcccatgctggactccgacggctccttcttcctctacagcaagctcaccgtggacaagagcaggtggcagcaggggaacgtcttctcatgctccgtgatgcatgaggctctgcacaaccactacacgcagaagagcctctccctgtctccgggt

SEQ ID NO: 202 - DNA, 1041 bp, Artificial Sequence
  Description of Artificial Sequence: Synthetic polynucleotide
atgccacctcctcgcctcctcttcttcctcctcttcctcacccccatggaagtcaggcccgaggaacctctagtggtgaaggtggaagagggagataacgctgtgctgcagtgcctcaaggggacctcagatggccccactcagcagctgacctggtctcgggagtccccgcttaaacccttcttaaaactcagcctggggctgccaggcctgggaatccacatgaggcccctggccatctggcttttcatcttcaacgtctctcaacagatggggggcttctacctgtgccagccggggcccccctctgagaaggcctggcagcctggctggacagtcaatgtggagggcagcgggggaggtgggtctggaggtggaggatctggtggaggtgggtctgacatccagatgacccagtctccatcctccctgtctgcatctgtaggagacagagtcaccatcacttgccaggcgagtcaggacatcagcaactatttaaattggtatcagcagaaaccagggaaagcccctaaactcctgatctacgatgcatccaatttggaaacaggggtcccatcaaggttcagtggaagtggatctgggacagattttactttcaccatcagcagcctgcagcctgaagatattgcaacatatttctgtcaacactttgatcatctcccgctcgctttcggcggagggaccaaggtggagatcaaacgaactgtggctgcaccatctgtcttcatcttcccgccatctgatgagcagttgaaatctggaactgcctctgttgtgtgcctgctgaataacttctatcccagagaggccaaagtacagtggaaggtggataacgccctccaatcgggtaactcccaggagagtgtcacagagcaggacagcaaggacagcacctacagcctcagcagcaccctgacgctgagcaaagcagactacgagaaacacaaagtctacgcctgcgaagtcacccatcagggcctgagctcgcccgtcacaaagagcttcaacaggggagagtgt

SEQ ID NO: 203 - DNA, 1731 bp, Artificial Sequence
  Description of Artificial Sequence: Synthetic polynucleotide
atgccacctcctcgcctcctcttcttcctcctcttcctcacccccatggaagtcaggcccgaggaacctctagtggtgaaggtggaagagggagataacgctgtgctgcagtgcctcaaggggacctcagatggccccactcagcagctgacctggtctcgggagtccccgcttaaacccttcttaaaactcagcctggggctgccaggcctgggaatccacatgaggcccctggccatctggcttttcatcttcaacgtctctcaacagatggggggcttctacctgtgccagccggggcccccctctgagaaggcctggcagcctggctggacagtcaatgtggagggcagcgggggaggtgggtctggaggtggaggatctggtggaggtgggtctcaggtgcagctgcaggagtcgggcccaggactggtgaagccttcggagaccctgtccctcacctgcactgtctctggtggctccgtcagcagtggtgattactactggacctggatccggcagtccccagggaagggactggagtggattggacacatctattacagtgggaacaccaattataacccctccctcaagagtcgactcaccatatcaattgacacgtccaagactcagttctccctgaagctgagttctgtgaccgctgcggacacggccatttattactgtgtgcgagatcgagtgactggtgcttttgatatctggggccaagggacaatggtcaccgtctcttcagcctccaccaagggcccatcggtcttccccctggcgccctgctccaggagcacctccgagagcacagcggccctgggctgcctggtcaaggactacttccctgaaccggtgacggtgtcgtggaactcaggcgctctgaccagcggcgtgcacaccttcccggctgtcctacagtcctcaggactctactccctcagcagcgtggtgaccgtgccctccagcaacttcggcacccagacctacacctgcaacgtagatcacaagcccagcaataccaaggtggacaagacagttgagcgcaaatgttgtgtcgagtgcccaccgtgcccagcaccacctgtggcaggaccgtcagtcttcctcttccccccaaaacccaaggacaccctcatgatctcccggacccctgaggtcacgtgcgtggtggtggacgtgagccacgaagaccccgaggtccagttcaactggtacgtggacggcgtggaggtgcataatgccaagacaaagccacgggaggagcagttccaaagcacgttccgtgtggtcagcgtcctcaccgtcgtgcaccaggactggctgaacggcaaggagtacaagtgcaaggtctccaacaaaggcctcccagcccccatcgagaaaaccatctccaaaaccaaagggcagccccgagaaccacaggtgtacaccctgcccccatcccgggaggagatgaccaagaaccaggtcagcctgacctgcctggtcaaaggcttctaccccagcgacatcgccgtggagtgggagagcaatgggcagccggagaacaactacaagaccacgcctcccatgctggactccgacggctccttcttcctctacagcaagctcaccgtggacaagagcaggtggcagcaggggaacgtcttctcatgctccgtgatgcatgaggctctgcacaaccactacacgcagaagagcctctccctgtctccgggt

SEQ ID NO: 204 - DNA, 702 bp, Artificial Sequence
  Description of Artificial Sequence: Synthetic polynucleotide
atggagacagacacactcctgctatgggtactgctgctctgggttccaggttccactggtgacatccagatgacccagtctccatcctccctgtctgcatctgtaggagacagagtcaccatcacttgccaggcgagtcaggacatcagcaactatttaaattggtatcagcagaaaccagggaaagcccctaaactcctgatctacgatgcatccaatttggaaacaggggtcccatcaaggttcagtggaagtggatctgggacagattttactttcaccatcagcagcctgcagcctgaagatattgcaacatatttctgtcaacactttgatcatctcccgctcgctttcggcggagggaccaaggtggagatcaaacgaactgtggctgcaccatctgtcttcatcttcccgccatctgatgagcagttgaaatctggaactgcctctgttgtgtgcctgctgaataacttctatcccagagaggccaaagtacagtggaaggtggataacgccctccaatcgggtaactcccaggagagtgtcacagagcaggacagcaaggacagcacctacagcctcagcagcaccctgacgctgagcaaagcagactacgagaaacacaaagtctacgcctgcgaagtcacccatcagggcctgagctcgcccgtcacaaagagcttcaacaggggagagtgt

SEQ ID NO: 205 - DNA, 1068 bp, Artificial Sequence
  Description of Artificial Sequence: Synthetic polynucleotide
atggagacagacacactcctgctatgggtactgctgctctgggttccaggttccactggtgacatccagatgacccagtctccatcctccctgtctgcatctgtaggagacagagtcaccatcacttgccaggcgagtcaggacatcagcaactatttaaattggtatcagcagaaaccagggaaagcccctaaactcctgatctacgatgcatccaatttggaaacaggggtcccatcaaggttcagtggaagtggatctgggacagattttactttcaccatcagcagcctgcagcctgaagatattgcaacatatttctgtcaacactttgatcatctcccgctcgctttcggcggagggaccaaggtggagatcaaacgaactgtggctgcaccatctgtcttcatcttcccgccatctgatgagcagttgaaatctggaactgcctctgttgtgtgcctgctgaataacttctatcccagagaggccaaagtacagtggaaggtggataacgccctccaatcgggtaactcccaggagagtgtcacagagcaggacagcaaggacagcacctacagcctcagcagcaccctgacgctgagcaaagcagactacgagaaacacaaagtctacgcctgcgaagtcacccatcagggcctgagctcgcccgtcacaaagagcttcaacaggggagagtgtgacaaaactcacacatcgccaccgtccccagcacctgaagccgcggggggaccgtcagaagtcaggcccgaggaacctctagtggtgaaggtggaagagggagataacgctgtgctgcagtgcctcaaggggacctcagatggccccactcagcagctgacctggtctcgggagtccccgcttaaacccttcttaaaactcagcctggggctgccaggcctgggaatccacatgaggcccctggccatctggcttttcatcttcaacgtctctcaacagatggggggcttctacctgtgccagccggggcccccctctgagaaggcctggcagcctggctggacagtcaatgtggagggcagcggg

SEQ ID NO: 206 - DNA, 1743 bp, Artificial Sequence
  Description of Artificial Sequence: Synthetic polynucleotide
atggagtttgggctgagctgggttttcctcgttgctctttttagaggtgtccagtgtcaggtgcagctgcaggagtcgggcccaggactggtgaagccttcggagaccctgtccctcacctgcactgtctctggtggctccgtcagcagtggtgattactactggacctggatccggcagtccccagggaagggactggagtggattggacacatctattacagtgggaacaccaattataacccctccctcaagagtcgactcaccatatcaattgacacgtccaagactcagttctccctgaagctgagttctgtgaccgctgcggacacggccatttattactgtgtgcgagatcgagtgactggtgcttttgatatctggggccaagggacaatggtcaccgtctcttcagcctccaccaagggcccatcggtcttccccctggcgccctgctccaggagcacctccgagagcacagcggccctgggctgcctggtcaaggactacttccctgaaccggtgacggtgtcgtggaactcaggcgctctgaccagcggcgtgcacaccttcccggctgtcctacagtcctcaggactctactccctcagcagcgtggtgaccgtgccctccagcaacttcggcacccagacctacacctgcaacgtagatcacaagcccagcaataccaaggtggacaagacagttgagcgcaaatgttgtgtcgagtgcccaccgtgcccagcaccacctgtggcaggaccgtcagtcttcctcttccccccaaaacccaaggacaccctcatgatctcccggacccctgaggtcacgtgcgtggtggtggacgtgagccacgaagaccccgaggtccagttcaactggtacgtggacggcgtggaggtgcataatgccaagacaaagccacgggaggagcagttccaaagcacgttccgtgtggtcagcgtcctcaccgtcgtgcaccaggactggctgaacggcaaggagtacaagtgcaaggtctccaacaaaggcctcccagcccccatcgagaaaaccatctccaaaaccaaagggcagccccgagaaccacaggtgtacaccctgcccccatcccgggaggagatgaccaagaaccaggtcagcctgacctgcctggtcaaaggcttctaccccagcgacatcgccgtggagtgggagagcaatgggcagccggagaacaactacaagaccacgcctcccatgctggactccgacggctccttcttcctctacagcaagctcaccgtggacaagagcaggtggcagcaggggaacgtcttctcatgctccgtgatgcatgaggctctgcacaaccactacacgcagaagagcctctccctgtctccgggtggtggaggtgggtctggaggtggaggatctggtggaggtgggtctgaagtcaggcccgaggaacctctagtggtgaaggtggaagagggagataacgctgtgctgcagtgcctcaaggggacctcagatggccccactcagcagctgacctggtctcgggagtccccgcttaaacccttcttaaaactcagcctggggctgccaggcctgggaatccacatgaggcccctggccatctggcttttcatcttcaacgtctctcaacagatggggggcttctacctgtgccagccggggcccccctctgagaaggcctggcagcctggctggacagtcaatgtggagggcagcggg

SEQ ID NO: 207 - DNA, 1380 bp, Artificial Sequence
  Description of Artificial Sequence: Synthetic polynucleotide
atggagtttgggctgagctgggttttcctcgttgctctttttagaggtgtccagtgtcaggttcagctggtgcagtctggtgctgaggtgaagaagcctggtgcctcagtgaaggtctcctgcaaggcttctggttacacattcactgactactacatgcactgggtgcgtcaggcccctggtcaaggtcttgagtggatgggtcgtgttaatcctaaccggaggggtactacctacaaccagaaattcgagggccgtgtcaccatgaccacagacacatccacgagcacagcctacatggagctgcgtagcctgcgttctgacgacacggccgtgtattactgtgcgcgtgcgaactggcttgactactggggccagggcaccaccgtcaccgtctcctccgcctccaccaagggcccatcggtcttcccgctagcgccctgctccaggagcacctccgagagcacagccgccctgggctgcctggtcaaggactacttccccgaaccggtgacggtgtcgtggaactcaggcgccctgaccagcggcgtgcacaccttcccggctgtcctacagtcctcaggactctactccctcagcagcgtggtgaccgtgccctccagcagcttgggcacgaagacctacacctgcaacgtagatcacaagcccagcaacaccaaggtggacaagagagttgagtccaaatatggtcccccatgcccaccctgcccagcacctgaggccgccgggggaccatcagtcttcctgttccccccaaaacccaaggacactctcatgatctcccggacccctgaggtcacgtgcgtggtggtggacgtgagccaggaagaccccgaggtccagttcaactggtacgtggatggcgtggaggtgcataatgccaagacaaagccgcgggaggagcagttcaacagcacgtaccgtgtggtcagcgtcctcaccgtcctgcaccaggactggctgaacggcaaggagtacaagtgcaaggtctccaacaaaggcctcccgtcctccatcgagaaaaccatctccaaagccaaagggcagccccgagagccacaggtgtacaccctgcccccatcccaggaggagatgaccaagaaccaggtcagcctgacctgcctggtcaaaggcttctaccccagcgacatcgccgtggagtgggaaagcaatgggcagccggagaacaactacaagaccacgcctcccgtgctggactccgacggctccttcttcctctacagcaggctaaccgtggacaagagcaggtggcaggaggggaatgtcttctcatgctccgtgatgcatgaggctctgcacaaccactacacacagaagagcctctccctgtctctgggt

SEQ ID NO: 208 - DNA, 1049 bp, Artificial Sequence
  Description of Artificial Sequence: Synthetic polynucleotide
atgccacctcctcgcctcctcttcttcctcctcttcctcacccccatggaagtcaggcccgaggaacctctagtggtgaaggtggaagagggagataacgctgtgctgcagtgcctcaaggggacctcagatggccccactcagcagctgacctggtctcgggagtccccgcttaaacccttcttaaaactcagcctggggctgccaggcctgggaatccacatgaggcccctggccatctggcttttcatcttcaacgtctctcaacagatggggggcttctacctgtgccagccggggcccccctctgagaaggcctggcagcctggctggacagtcaatgtggagggcagcgggggaggtgggtctggaggtggaggatctggtggaggtgggtctgacatccagatgacccagtctccatcctccctgtctgcatctgtaggagacagagtcaccatcacttgcagtgtcagctcaagtgtatcctccatttacttgcactggtatcagcagaaaccagggaaagcccctaagctcctgatctatagcacatccaacttggcttctggagtcccatcaaggttcagtggcagtggatctgggacagatttcactctcaccatcagcagtctgcaacctgaagattttgcaacttactactgtcaagtctacagtggttacccgctcacgttcggcggagggaccaaggtggagatcaaacgaactgtggctgcaccatctgtcttcatcttcccgccatctgatgagcagttgaaatctggaactgcctctgttgtgtgcctgctgaataacttctatcccagagaggccaaagtacagtggaaggtggataacgccctccaatcgggtaactcccaggagagtgtcacagagcaggacagcaaggacagcacctacagcctcagcagcaccctgacgctgagcaaagcagactacgagaaacacaaagtctacgcctgcgaagtcacccatcagggcctgagctcgcccgtcacaaagagcttcaacaggggagagtgctaata

SEQ ID NO: 209 - DNA, 1719 bp, Artificial Sequence
  Description of Artificial Sequence: Synthetic polynucleotide
atgccacctcctcgcctcctcttcttcctcctcttcctcacccccatggaagtcaggcccgaggaacctctagtggtgaaggtggaagagggagataacgctgtgctgcagtgcctcaaggggacctcagatggccccactcagcagctgacctggtctcgggagtccccgcttaaacccttcttaaaactcagcctggggctgccaggcctgggaatccacatgaggcccctggccatctggcttttcatcttcaacgtctctcaacagatggggggcttctacctgtgccagccggggcccccctctgagaaggcctggcagcctggctggacagtcaatgtggagggcagcgggggaggtgggtctggaggtggaggatctggtggaggtgggtctcaggttcagctggtgcagtctggtgctgaggtgaagaagcctggtgcctcagtgaaggtctcctgcaaggcttctggttacacattcactgactactacatgcactgggtgcgtcaggcccctggtcaaggtcttgagtggatgggtcgtgttaatcctaaccggaggggtactacctacaaccagaaattcgagggccgtgtcaccatgaccacagacacatccacgagcacagcctacatggagctgcgtagcctgcgttctgacgacacggccgtgtattactgtgcgcgtgcgaactggcttgactactggggccagggcaccaccgtcaccgtctcctccgcctccaccaagggcccatcggtcttcccgctagcgccctgctccaggagcacctccgagagcacagccgccctgggctgcctggtcaaggactacttccccgaaccggtgacggtgtcgtggaactcaggcgccctgaccagcggcgtgcacaccttcccggctgtcctacagtcctcaggactctactccctcagcagcgtggtgaccgtgccctccagcagcttgggcacgaagacctacacctgcaacgtagatcacaagcccagcaacaccaaggtggacaagagagttgagtccaaatatggtcccccatgcccaccctgcccagcacctgaggccgccgggggaccatcagtcttcctgttccccccaaaacccaaggacactctcatgatctcccggacccctgaggtcacgtgcgtggtggtggacgtgagccaggaagaccccgaggtccagttcaactggtacgtggatggcgtggaggtgcataatgccaagacaaagccgcgggaggagcagttcaacagcacgtaccgtgtggtcagcgtcctcaccgtcctgcaccaggactggctgaacggcaaggagtacaagtgcaaggtctccaacaaaggcctcccgtcctccatcgagaaaaccatctccaaagccaaagggcagccccgagagccacaggtgtacaccctgcccccatcccaggaggagatgaccaagaaccaggtcagcctgacctgcctggtcaaaggcttctaccccagcgacatcgccgtggagtgggaaagcaatgggcagccggagaacaactacaagaccacgcctcccgtgctggactccgacggctccttcttcctctacagcaggctaaccgtggacaagagcaggtggcaggaggggaatgtcttctcatgctccgtgatgcatgaggctctgcacaaccactacacacagaagagcctctccctgtctctg

SEQ ID NO: 210 - DNA, 705 bp, Artificial Sequence
  Description of Artificial Sequence: Synthetic polynucleotide
atggagacagacacactcctgctatgggtactgctgctctgggttccaggttccactggtgacatccagatgacccagtctccatcctccctgtctgcatctgtaggagacagagtcaccatcacttgcagtgtcagctcaagtgtatcctccatttacttgcactggtatcagcagaaaccagggaaagcccctaagctcctgatctatagcacatccaacttggcttctggagtcccatcaaggttcagtggcagtggatctgggacagatttcactctcaccatcagcagtctgcaacctgaagattttgcaacttactactgtcaagtctacagtggttacccgctcacgttcggcggagggaccaaggtggagatcaaacgaactgtggctgcaccatctgtcttcatcttcccgccatctgatgagcagttgaaatctggaactgcctctgttgtgtgcctgctgaataacttctatcccagagaggccaaagtacagtggaaggtggataacgccctccaatcgggtaactcccaggagagtgtcacagagcaggacagcaaggacagcacctacagcctcagcagcaccctgacgctgagcaaagcagactacgagaaacacaaagtctacgcctgcgaagtcacccatcagggcctgagctcgcccgtcacaaagagcttcaacaggggagagtgc

SEQ ID NO: 211 - DNA, 1071 bp, Artificial Sequence
  Description of Artificial Sequence: Synthetic polynucleotide
atggagacagacacactcctgctatgggtactgctgctctgggttccaggttccactggtgacatccagatgacccagtctccatcctccctgtctgcatctgtaggagacagagtcaccatcacttgcagtgtcagctcaagtgtatcctccatttacttgcactggtatcagcagaaaccagggaaagcccctaagctcctgatctatagcacatccaacttggcttctggagtcccatcaaggttcagtggcagtggatctgggacagatttcactctcaccatcagcagtctgcaacctgaagattttgcaacttactactgtcaagtctacagtggttacccgctcacgttcggcggagggaccaaggtggagatcaaacgaactgtggctgcaccatctgtcttcatcttcccgccatctgatgagcagttgaaatctggaactgcctctgttgtgtgcctgctgaataacttctatcccagagaggccaaagtacagtggaaggtggataacgccctccaatcgggtaactcccaggagagtgtcacagagcaggacagcaaggacagcacctacagcctcagcagcaccctgacgctgagcaaagcagactacgagaaacacaaagtctacgcctgcgaagtcacccatcagggcctgagctcgcccgtcacaaagagcttcaacaggggagagtgcgacaaaactcacacatcgccaccgtccccagcacctgaagccgcggggggaccgtcagaagtcaggcccgaggaacctctagtggtgaaggtggaagagggagataacgctgtgctgcagtgcctcaaggggacctcagatggccccactcagcagctgacctggtctcgggagtccccgcttaaacccttcttaaaactcagcctggggctgccaggcctgggaatccacatgaggcccctggccatctggcttttcatcttcaacgtctctcaacagatggggggcttctacctgtgccagccggggcccccctctgagaaggcctggcagcctggctggacagtcaatgtggagggcagcggg

SEQ ID NO: 212 - DNA, 1734 bp, Artificial Sequence
  Description of Artificial Sequence: Synthetic polynucleotide
atggagtttgggctgagctgggttttcctcgttgctctttttagaggtgtccagtgtcaggttcagctggtgcagtctggtgctgaggtgaagaagcctggtgcctcagtgaaggtctcctgcaaggcttctggttacacattcactgactactacatgcactgggtgcgtcaggcccctggtcaaggtcttgagtggatgggtcgtgttaatcctaaccggaggggtactacctacaaccagaaattcgagggccgtgtcaccatgaccacagacacatccacgagcacagcctacatggagctgcgtagcctgcgttctgacgacacggccgtgtattactgtgcgcgtgcgaactggcttgactactggggccagggcaccaccgtcaccgtctcctccgcctccaccaagggcccatcggtcttcccgctagcgccctgctccaggagcacctccgagagcacagccgccctgggctgcctggtcaaggactacttccccgaaccggtgacggtgtcgtggaactcaggcgccctgaccagcggcgtgcacaccttcccggctgtcctacagtcctcaggactctactccctcagcagcgtggtgaccgtgccctccagcagcttgggcacgaagacctacacctgcaacgtagatcacaagcccagcaacaccaaggtggacaagagagttgagtccaaatatggtcccccatgcccaccctgcccagcacctgaggccgccgggggaccatcagtcttcctgttccccccaaaacccaaggacactctcatgatctcccggacccctgaggtcacgtgcgtggtggtggacgtgagccaggaagaccccgaggtccagttcaactggtacgtggatggcgtggaggtgcataatgccaagacaaagccgcgggaggagcagttcaacagcacgtaccgtgtggtcagcgtcctcaccgtcctgcaccaggactggctgaacggcaaggagtacaagtgcaaggtctccaacaaaggcctcccgtcctccatcgagaaaaccatctccaaagccaaagggcagccccgagagccacaggtgtacaccctgcccccatcccaggaggagatgaccaagaaccaggtcagcctgacctgcctggtcaaaggcttctaccccagcgacatcgccgtggagtgggaaagcaatgggcagccggagaacaactacaagaccacgcctcccgtgctggactccgacggctccttcttcctctacagcaggctaaccgtggacaagagcaggtggcaggaggggaatgtcttctcatgctccgtgatgcatgaggctctgcacaaccactacacacagaagagcctctccctgtctctgggtggtggaggtgggtctggaggtggaggatctggtggaggtgggtctgaagtcaggcccgaggaacctctagtggtgaaggtggaagagggagataacgctgtgctgcagtgcctcaaggggacctcagatggccccactcagcagctgacctggtctcgggagtccccgcttaaacccttcttaaaactcagcctggggctgccaggcctgggaatccacatgaggcccctggccatctggcttttcatcttcaacgtctctcaacagatggggggcttctacctgtgccagccggggcccccctctgagaaggcctggcagcctggctggacagtcaatgtggagggcagcggg

SEQ ID NO: 213 - DNA, 1938 bp, Artificial Sequence
  Description of Artificial Sequence: Synthetic polynucleotide
atggagacagacacactcctgctatgggtactgctgctctgggttccaggttccactggtgacatccagatgacacagactacatcctccctgtctgcctctctgggagacagagtcaccatcagttgcagggcaagtcaggacattagtaaatatttaaattggtatcagcagaaaccagatggaactgttaaactcctgatctaccatacatcaagattacactcaggagtcccatcaaggttcagtggcagtgggtctggaacagattattctctcaccattagcaacctggagcaagaagatattgccacttacttttgccaacagggtaatacgcttccgtacacgttcggaggggggactaagttggaaataacaggaggaggtgggtctggaggtggaggatctggtggaggtgggtctggaggaggtgggtctgaggtgaaactgcaggagtcaggacctggcctggtggcgccctcacagagcctgtccgtcacatgcactgtctcaggggtctcattacccgactatggtgtaagctggattcgccagcctccacgaaagggtctggagtggctgggagtaatatggggtagtgaaaccacatactataattcagctctcaaatccagactgaccatcatcaaggacaactccaagagccaagttttcttaaaaatgaacagtctgcaaactgatgacacagccatttactactgtgccaaacattattactacggtggtagctatgctatggactactggggtcaaggaacctcagtcaccgtctcctcaccgagccagttccgggtgtcgccgctggatcggacctggaacctgggcgagacagtggagctgaagtgccaggtgctgctgtccaacccgacgtcgggctgctcgtggctcttccagccgcgcggcgccgccgccagtcccaccttcctcctatacctctcccaaaacaagcccaaggcggccgaggggctggacacccagcggttctcgggcaagaggttgggggacaccttcgtcctcaccctgagcgacttccgccgagagaacgagggctactatttctgctcggccctgagcaactccatcatgtacttcagccacttcgtgccggtcttcctgccagcgaagcccaccacgacgccagcgccgcgaccaccaacaccggcgcccaccatcgcgtcgcagcccctgtccctgcgcccagaggcgtgccggccagcggcggggggcgcagtgcacacgagggggctggacttcgcctgtgatatctacatctgggcgcccttggccgggacttgtggggtccttctcctgtcactggttatcaccaggagtaagaggagcaggctcctgcacagtgactacatgaacatgactccccgccgccccgggcccacccgcaagcattaccagccctatgccccaccacgcgacttcgcagcctatcgctccaaacggggcagaaagaaactcctgtatatattcaaacaaccatttatgagaccagtacaaactactcaagaggaagatggctgtagctgccgatttccagaagaagaagaaggaggatgtgaactgagagtgaagttcagcaggagcgcagacgcccccgcgtaccagcagggccagaaccagctctataacgagctcaatctaggacgaagagaggagtacgatgttttggacaagagacgtggccgggaccctgagatggggggaaagccgcagagaaggaagaaccctcaggaaggcctgtacaatgaactgcagaaagataagatggcggaggcctacagtgagattgggatgaaaggcgagcgccggaggggcaaggggcacgatggcctttaccagggtctcagtacagccaccaaggacacctacgacgcccttcacatgcaggccctgccccctcgc

SEQ ID NO: 214 - DNA, 375 bp, Artificial Sequence
  Description of Artificial Sequence: Synthetic polynucleotide
atgccacctcctcgcctcctcttcttcctcctcttcctcacccccatggaagtcaggcccgaggaacctctagtggtgaaggtggaagagggagataacgctgtgctgcagtgcctcaaggggacctcagatggccccactcagcagctgacctggtctcgggagtccccgcttaaacccttcttaaaactcagcctggggctgccaggcctgggaatccacatgaggcccctggccatctggcttttcatcttcaacgtctctcaacagatggggggcttctacctgtgccagccggggcccccctctgagaaggcctggcagcctggctggacagtcaatgtggagggcagcgggcatcatcaccatcaccat

SEQ ID NO: 215 - DNA, 1035 bp, Artificial Sequence
  Description of Artificial Sequence: Synthetic polynucleotide
atgccacctcctcgcctcctcttcttcctcctcttcctcacccccatggaagtcaggcccgaggaacctctagtggtgaaggtggaagagggagataacgctgtgctgcagtgcctcaaggggacctcagatggccccactcagcagctgacctggtctcgggagtccccgcttaaacccttcttaaaactcagcctggggctgccaggcctgggaatccacatgaggcccctggccatctggcttttcatcttcaacgtctctcaacagatggggggcttctacctgtgccagccggggcccccctctgagaaggcctggcagcctggctggacagtcaatgtggagggcagcggggacaaaactcacacatgcccaccgtgcccagcacctgaactcctggggggaccgtcagtcttcctcttccccccaaaacccaaggacaccctcatgatctcccggacccctgaggtcacatgcgtggtggtggacgtgagccacgaagaccctgaggtcaagttcaactggtacgtggacggcgtggaggtgcataatgccaagacaaagccgcgggaggagcagtacaacagcacgtaccgtgtggtcagcgtcctcaccgtcctgcaccaggactggctgaatggcaaggagtacaagtgcaaggtctccaacaaagccctcccagcccccatcgagaaaaccatctccaaagccaaagggcagccccgagaaccacaggtgtacaccctgcccccatcccgggaggagatgaccaagaaccaggtcagcctgacctgcctggtcaaaggcttctatcccagcgacatcgccgtggagtgggagagcaatgggcagccggagaacaactacaagaccacgcctcccgtgctggactccgacggctccttcttcctctacagcaagctcaccgtggacaagagcaggtggcagcaggggaacgtcttctcatgctccgtgatgcacgaggctctgcacaaccactacacgcagaagagcctctccctgtctccgggt

SEQ ID NO: 216 - DNA, 822 bp, Artificial Sequence
  Description of Artificial Sequence: Synthetic polynucleotide
atggagtttgggctgagctgggttttcctcgttgctctttttagaggtgtccagtgtgaggtgcagctggtggagtctggtggtggtcttgttcaacctggtggttctcttcgtctttcttgtgctgcttctggttttaatattaaagatacttatattcattgggttcgtcaagctcctggtaaaggtcttgaatgggttgctcgtatttatcctactaatggttatactcgttatgctgattctgttaaaggtcgttttactatttctgctgatacttctaaaaatactgcttatcttcaaatgaactctcttcgtgctgaagatactgctgtttattattgttctcgttggggtggtgatggtttttatgctatggattattggggtcaaggtactcttgtcaccgtctcctcagctagcaccgggggaggtgggtctggaggtggaggatctggtggaggtgggtctgacatccagatgacccagtctccttcttctctttctgcttctgttggtgatcgtgttactattacttgtcgtgcttctcaagatgttaatactgctgttgcttggtatcaacaaaaacctggtaaagctcctaaacttcttatttattctgcttcttttctttattctggtgttccttctcgtttttctggttctcgttctggtactgattttactcttactatttcttctcttcaacctgaagattttgctacttattattgtcaacaacattatactactcctcctacttttggtcaaggtaccaaggtggagatcaaacgtacggggccccatcatcaccatcaccat

SEQ ID NO: 217 - DNA, 840 bp, Artificial Sequence
  Description of Artificial Sequence: Synthetic polynucleotide
atggagtttgggctgagctgggttttcctcgttgctctttttagaggtgtccagtgtcaggtgcagctggtgcagagcggcgccgaggacaagaagcccggcgagagcgtgaagatcagctgcaaggccagcggctacaccttcaccaactacggcatgaactgggtgaggcaggcccccggccagggcctgaagtggatgggctggatcaacacctacaccggcgagagcacctacgccgacgacttcaagggcaggttcgccttcagcctggacaccagcgccagcaccgcctacctgcagctgagcagcctgaggggcgaggacaccgccgtgtacttctgcgccaggttcgccatcaagggcgactactggggccagggcaccaccgtgaccgtgagcagcgccagcaccggcggcggcggcagcggcggcggcggcagcggcggcggcggcagcggcggcggcggcagcgacatcgtgatgacccagagccccctgagcctggaggtgagccccggcgagcccgccagcatcagctgcaggagcaccaagagcctgctgcacagcgacggcatcacctacctgtactggtacctgcagaagcccggccagagcccccagctgctgatctaccagctgagcaacctggccagcggcgtgcccgacaggttcagcagcagcggcagcggcaccgacttcaccctgaagatcagcagggtggaggccgaggacgagggcacctactactgcgcccagaacctggagatccccaggaccttcggccagggcaccaagctggagatcaagaggaccgggccccatcatcaccatcaccat

SEQ ID NO: 218 - DNA, 834 bp, Artificial Sequence
  Description of Artificial Sequence: Synthetic polynucleotide
atggagacagacacactcctgctatgggtactgctgctctgggttccaggttccactggtgacatcgtgatgacccagagccccctgagcctgcccgtgacccccggcgagcccgccagcatcagctgcaggagcaccaagagcctgctgcacagcgacggcatcacctacctgtactggtacctgcagaagcccggccagagcccccagctgctgatctaccagctgagcaacctggccagcggcgtgcccgacaggttcagcagcagcggcagcggcaccgacttcaccctgaagatcagcagggtggaggccgaggacgagggcgtgtactactgcgcccagaacctggagatccccaggaccttcggctgcggcaccaagctggagatcaagaggaccggcggcggcggcagcggcggcggcggcagcggcggcggcggcagcggcggcggcggcagccaggtgcagctggtgcagagcggcgccgaggtgaagaagcccggcgagagcgtgaagatcagctgcaaggccagcggctacaccttcaccaactacggcatgaactgggtgaggcaggcccccggccagtgcctgaagtggatgggctggatcaacacctacaccggcgagagcacctacgccgacgacttcaagggcaggttcgccttcagcctggacaccagcgccagcaccgcctacctgcagctgagcagcctgaggagcgaggacaccgccgtgtacttctgcgccaggttcgccatcaagggcgactactggggccagggcaccctggtgaccgtgagcagcgggccccatcatcaccatcaccat

SEQ ID NO: 219 - DNA, 825 bp, Artificial Sequence
  Description of Artificial Sequence: Synthetic polynucleotide
atggagtttgggctgagctgggttttcctcgttgctctttttagaggtgtccagtgtcaggttcagctggtgcagtctggtgctgaggatgtgaagcctgatgcctcagtgaagctctcctgcaaggcttctggttacacattcactgactactacatgcactgggtgcgtcaggcccctggtcaaggtcttgagtggatgggtcgtgttaatcctaaccggaggggtactacctacaaccagaaattcgagggccgtgtcaccatgaccacagacacatccacgagcacagcctacatgcagctgagtagcctgcgtggtgaagacacggccgtgtattactgtgcgcgtgcgaactggcttgactactggggccagggcaccaccgtcaccgtctcctccgcctccaccgggggaggtgggtctggaggtggaggatctggtggaggtgggtctggtggaggtgggtctgacatccagatgacccagtctccatcctccctggaggcatctgtaggagacagagtcaccatcacttgcagtgtcagctcaagtgtatcctccatttacttgcactggtatcagcagaaaccagggaaaagccctaagctcctgatctatagcacatccaacttggcttctggagtcccagataggttcagtggcagtggatctgggacagatttcactctcaccatcagcagtctgcaagccgaagatgagggcacttactactgtcaagtctacagtggttacccgctcacgttcggcggagggaccaagctggagatcaaacgaactgggccccatcatcaccatcaccat

SEQ ID NO: 220 - DNA, 819 bp, Artificial Sequence
  Description of Artificial Sequence: Synthetic polynucleotide
atggagacagacacactcctgctatgggtactgctgctctgggttccaggttccactggtgacatccagatgacccagtctccatcctccctgtctgcatctgtaggagacagagtcaccatcacttgcagtgtcagctcaagtgtatcctccatttacttgcactggtatcagcagaaaccagggaaagcccctaagctcctgatctatagcacatccaacttggcttctggagtcccatcaaggttcagtggcagtggatctgggacagatttcactctcaccatcagcagtctgcaacctgaagatgaagcaacttactactgtcaagtctacagtggttacccgctcacgttcggctgcgggaccaaggtggagatcaaacgaactgggggaggtgggtctggaggtggaggatctggtggaggtgggtctggtggaggtgggtctcaggttcagctggtgcagtctggtgctgaggataagaagcctggtgcctcagtgaaggtctcctgcaaggcttctggttacacattcactgactactacatgcactgggtgcgtcaggcccctggtcaatgtcttgagtggatgggtcgtgttaatcctaaccggaggggtactacctacaaccagaaattcgagggccgtgtcaccatgaccacagacacatccacgagcacagcctacatggagctgcgtagcctgcgttctgacgacacggccgtgtattactgtgcgcgtgcgaactggcttgactactggggccagggcaccaccgtcaccgtctcctccgggccccatcatcaccatcaccat

SEQ ID NO: 221 - DNA, 834 bp, Artificial Sequence
  Description of Artificial Sequence: Synthetic polynucleotide
atggagtttgggctgagctgggttttcctcgttgctctttttagaggtgtccagtgtcaggtgcagctgcaggagagcggccccggcgacgtgaagcccagcgagaccctgagcctgacctgcaccgtgagcggcggcagcgtgagcagcggcgactactactggacctggatcaggcagagccccggcaagggcctggagtggatcggccacatctactacagcggcaacaccaactacaaccccagcctgaagagcaggctgaccatcagcatcgacaccagcaagaccaccttcagcctgcagctgagcagcgtgaccggcgaggacaccgccatctactactgcgtgagggacagggtgaccggcgccttcgacatctggggccagggcaccaccgtgaccgtgagcagcgccagcaccggcggcggcggcagcggcggcggcggcagcggcggcggcggcagcggcggcggcggcagcgacatccagatgacccagagccccagcagcctggaggccagcgtgggcgacagggtgaccatcacctgccaggccagccaggacatcagcaactacctgaactggtaccagcagaagcccggcaagagccccaagctgctgatctacgacgccagcaacctggagaccggcgtgcccgacaggttcagcggcagcggcagcggcaccgacttcaccttcaccatcagcagcctgcaggccgaggacgagggcacctacttctgccagcacttcgaccacctgcccctggccttcggcggcggcaccaagctggagatcaagaggaccgggccccatcatcaccatcaccat

SEQ ID NO: 222 - DNA, 828 bp, Artificial Sequence
  Description of Artificial Sequence: Synthetic polynucleotide
atggagacagacacactcctgctatgggtactgctgctctgggttccaggttccactggtgacatccagatgacccagagccccagcagcctgagcgccagcgtgggcgacagggtgaccatcacctgccaggccagccaggacatcagcaactacctgaactggtaccagcagaagcccggcaaggcccccaagctgctgatctacgacgccagcaacctggagaccggcgtgcccagcaggttcagcggcagcggcagcggcaccgacttcaccttcaccatcagcagcctgcagcccgaggacgaggccacctacttctgccagcacttcgaccacctgcccctggccttcggctgcggcaccaaggtggagatcaagaggaccggcggcggcggcagcggcggcggcggcagcggcggcggcggcagcggcggcggcggcagccaggtgcagctgcaggagagcggccccggcgacgtgaagcccagcgagaccctgagcctgacctgcaccgtgagcggcggcagcgtgagcagcggcgactactactggacctggatcaggcagagccccggcaagtgcctggagtggatcggccacatctactacagcggcaacaccaactacaaccccagcctgaagagcaggctgaccatcagcatcgacaccagcaagacccagttcagcctgaagctgagcagcgtgaccgccgccgacaccgccatctactactgcgtgagggacagggtgaccggcgccttcgacatctggggccagggcaccaccgtgaccgtgagcagcgggccccatcatcaccatcaccat

SEQ ID NO: 223 - DNA, 1368 bp, Artificial Sequence
  Description of Artificial Sequence: Synthetic polynucleotide
atgccacctcctcgcctcctcttcttcctcctcttcctcacccccatggaagtcaggcatcatcaccatcaccatcccgaggaacctctagtggtgaaggtggaagagggagataacgctgtgctgcagtgcctcaaggggacctcagatggccccactcagcagctgacctggtctcgggagtccccgcttaaacccttcttaaaactcagcctggggctgccaggcctgggaatccacatgaggcccctggccatctggcttttcatcttcaacgtctctcaacagatggggggcttctacctgtgccagccggggcccccctctgagaaggcctggcagcctggctggacagtcaatgtggagggcagcggggagctgttccggtggaatgtttcggacctaggtggcctgggctgtggcctgaagaacaggtcctcagagggccccagctccccttccgggaagctcatgagccccaagctgtatgtgtgggccaaagaccgccctgagatctgggagggagagcctccgtgtctcccaccgagggacagcctgaaccagagcctcagccaggacctcaccatggcccctggctccacactctggctgtcctgtggggtaccccctgactctgtgtccaggggccccctctcctggacccatgtgcaccccaaggggcctaagtcattgctgagcctagagctgaaggacgatcgcccggccagagatatgtgggtaatggagacgggtctgttgttgccccgggccacagctcaagacgctggaaagtattattgtcaccgtggcaacctgaccatgtcattccacctggagatcactgctcggccagggggaggtgggtctggaggtggaggatctggtggaggtgggtctgtcagatcatcttctcgaaccccgagtgacaagcctgtagcccatgttgtagcaaaccctcaagctgaggggcagctccagtggctgaaccgccgggccaatgccctcctggccaatggcgtggagctgagagataaccagctggtggtgccatcagagggcctgtacctcatctactcccaggtcctcttcaagggccaaggctgcccctccacccatgtgctcctcacccacaccatcagccgcatcgccgtctcctaccagaccaaggtcaacctcctctctgccatcaagagcccctgccagagggagaccccagagggggctgaggccaagccctggtatgagcccatctatctgggaggggtcttccagctggagaagggtgaccgactcagcgctgagatcaatcggcccgactatctcgactttgccgagtctgggcaggtctactttgggatcattgccctg

SEQ ID NO: 224 - DNA, 1194 bp, Artificial Sequence
  Description of Artificial Sequence: Synthetic polynucleotide
atggagtttgggctgagctgggttttcctcgttgctctttttagaggtgtccagtgtgaggtgcagctggtggagtctggtggtggtcttgttcaacctggtggttctcttcgtctttcttgtgctgcttctggttttaatattaaagatacttatattcattgggttcgtcaagctcctggtaaaggtcttgaatgggttgctcgtatttatcctactaatggttatactcgttatgctgattctgttaaaggtcgttttactatttctgctgatacttctaaaaatactgcttatcttcaaatgaactctcttcgtgctgaagatactgctgtttattattgttctcgttggggtggtgatggtttttatgctatggattattggggtcaaggtactcttgtcaccgtctcctcagctagcaccgggggaggtgggtctggaggtggaggatctggtggaggtgggtctgacatccagatgacccagtctccttcttctctttctgcttctgttggtgatcgtgttactattacttgtcgtgcttctcaagatgttaatactgctgttgcttggtatcaacaaaaacctggtaaagctcctaaacttcttatttattctgcttcttttctttattctggtgttccttctcgtttttctggttctcgttctggtactgattttactcttactatttcttctcttcaacctgaagattttgctacttattattgtcaacaacattatactactcctcctacttttggtcaaggtaccaaggtggagatcaaacgtacggacaaaactcacacatcgccaccgtccccagcacctgaagccgcggggggaccgtcagaagtcaggcccgaggaacctctagtggtgaaggtggaagagggagataacgctgtgctgcagtgcctcaaggggacctcagatggccccactcagcagctgacctggtctcgggagtccccgcttaaacccttcttaaaactcagcctggggctgccaggcctgggaatccacatgaggcccctggccatctggcttttcatcttcaacgtctctcaacagatggggggcttctacctgtgccagccggggcccccctctgagaaggcctggcagcctggctggacagtcaatgtggagggcagcgggtctagagggccccatcatcaccatcaccat

SEQ ID NO: 225 - DNA, 1842 bp, Artificial Sequence
  Description of Artificial Sequence: Synthetic polynucleotide
atggagtttgggctgagctgggttttcctcgttgctctttttagaggtgtccagtgtgaggtgcagctggtggagtctggtggtggtcttgttcaacctggtggttctcttcgtctttcttgtgctgcttctggttttaatattaaagatacttatattcattgggttcgtcaagctcctggtaaaggtcttgaatgggttgctcgtatttatcctactaatggttatactcgttatgctgattctgttaaaggtcgttttactatttctgctgatacttctaaaaatactgcttatcttcaaatgaactctcttcgtgctgaagatactgctgtttattattgttctcgttggggtggtgatggtttttatgctatggattattggggtcaaggtactcttgtcaccgtctcctcagctagcaccgggggaggtgggtctggaggtggaggatctggtggaggtgggtctgacatccagatgacccagtctccttcttctctttctgcttctgttggtgatcgtgttactattacttgtcgtgcttctcaagatgttaatactgctgttgcttggtatcaacaaaaacctggtaaagctcctaaacttcttatttattctgcttcttttctttattctggtgttccttctcgtttttctggttctcgttctggtactgattttactcttactatttcttctcttcaacctgaagattttgctacttattattgtcaacaacattatactactcctcctacttttggtcaaggtaccaaggtggagatcaaacgtacggacaaaactcacacatcgccaccgtccccagcacctgaagccgcggggggaccgtcagaagtcaggcccgaggaacctctagtggtgaaggtggaagagggagataacgctgtgctgcagtgcctcaaggggacctcagatggccccactcagcagctgacctggtctcgggagtccccgcttaaacccttcttaaaactcagcctggggctgccaggcctgggaatccacatgaggcccctggccatctggcttttcatcttcaacgtctctcaacagatggggggcttctacctgtgccagccggggcccccctctgagaaggcctggcagcctggctggacagtcaatgtggagggcagcggggacaaaactcacacatgcccaccgtgcccagcacctgaactcctggggggaccgtcagtcttcctcttccccccaaaacccaaggacaccctcatgatctcccggacccctgaggtcacatgcgtggtggtggacgtgagccacgaagaccctgaggtcaagttcaactggtacgtggacggcgtggaggtgcataatgccaagacaaagccgcgggaggagcagtacaacagcacgtaccgtgtggtcagcgtcctcaccgtcctgcaccaggactggctgaatggcaaggagtacaagtgcaaggtctccaacaaagccctcccagcccccatcgagaaaaccatctccaaagccaaagggcagccccgagaaccacaggtgtacaccctgcccccatcccgggaggagatgaccaagaaccaggtcagcctgacctgcctggtcaaaggcttctatcccagcgacatcgccgtggagtgggagagcaatgggcagccggagaacaactacaagaccacgcctcccgtgctggactccgacggctccttcttcctctacagcaagctcaccgtggacaagagcaggtggcagcaggggaacgtcttctcatgctccgtgatgcacgaggctctgcacaaccactacacgcagaagagcctctccctgtctccgggt

SEQ ID NO: 226 - DNA, 1188 bp, Artificial Sequence
  Description of Artificial Sequence: Synthetic polynucleotide
atgccacctcctcgcctcctcttcttcctcctcttcctcacccccatggaagtcaggcccgaggaacctctagtggtgaaggtggaagagggagataacgctgtgctgcagtgcctcaaggggacctcagatggccccactcagcagctgacctggtctcgggagtccccgcttaaacccttcttaaaactcagcctggggctgccaggcctgggaatccacatgaggcccctggccatctggcttttcatcttcaacgtctctcaacagatggggggcttctacctgtgccagccggggcccccctctgagaaggcctggcagcctggctggacagtcaatgtggagggcagcggggggggaggtgggtctggaggtggaggatctggtggaggtgggtctggtggaggtgggtctgaggtgcagctggtggagtctggtggtggtcttgttcaacctggtggttctcttcgtctttcttgtgctgcttctggttttaatattaaagatacttatattcattgggttcgtcaagctcctggtaaaggtcttgaatgggttgctcgtatttatcctactaatggttatactcgttatgctgattctgttaaaggtcgttttactatttctgctgatacttctaaaaatactgcttatcttcaaatgaactctcttcgtgctgaagatactgctgtttattattgttctcgttggggtggtgatggtttttatgctatggattattggggtcaaggtactcttgtcaccgtctcctcagctagcaccgggggaggtgggtctggaggtggaggatctggtggaggtgggtctgacatccagatgacccagtctccttcttctctttctgcttctgttggtgatcgtgttactattacttgtcgtgcttctcaagatgttaatactgctgttgcttggtatcaacaaaaacctggtaaagctcctaaacttcttatttattctgcttcttttctttattctggtgttccttctcgtttttctggttctcgttctggtactgattttactcttactatttcttctcttcaacctgaagattttgctacttattattgtcaacaacattatactactcctcctacttttggtcaaggtaccaaggtggagatcaaacgtacgtctagagggccccatcatcaccatcaccat

SEQ ID NO: 227 - DNA, 1836 bp, Artificial Sequence
  Description of Artificial Sequence: Synthetic polynucleotide
atgccacctcctcgcctcctcttcttcctcctcttcctcacccccatggaagtcaggcccgaggaacctctagtggtgaaggtggaagagggagataacgctgtgctgcagtgcctcaaggggacctcagatggccccactcagcagctgacctggtctcgggagtccccgcttaaacccttcttaaaactcagcctggggctgccaggcctgggaatccacatgaggcccctggccatctggcttttcatcttcaacgtctctcaacagatggggggcttctacctgtgccagccggggcccccctctgagaaggcctggcagcctggctggacagtcaatgtggagggcagcggggggggaggtgggtctggaggtggaggatctggtggaggtgggtctggtggaggtgggtctgaggtgcagctggtggagtctggtggtggtcttgttcaacctggtggttctcttcgtctttcttgtgctgcttctggttttaatattaaagatacttatattcattgggttcgtcaagctcctggtaaaggtcttgaatgggttgctcgtatttatcctactaatggttatactcgttatgctgattctgttaaaggtcgttttactatttctgctgatacttctaaaaatactgcttatcttcaaatgaactctcttcgtgctgaagatactgctgtttattattgttctcgttggggtggtgatggtttttatgctatggattattggggtcaaggtactcttgtcaccgtctcctcagctagcaccgggggaggtgggtctggaggtggaggatctggtggaggtgggtctgacatccagatgacccagtctccttcttctctttctgcttctgttggtgatcgtgttactattacttgtcgtgcttctcaagatgttaatactgctgttgcttggtatcaacaaaaacctggtaaagctcctaaacttcttatttattctgcttcttttctttattctggtgttccttctcgtttttctggttctcgttctggtactgattttactcttactatttcttctcttcaacctgaagattttgctacttattattgtcaacaacattatactactcctcctacttttggtcaaggtaccaaggtggagatcaaacgtacggacaaaactcacacatgcccaccgtgcccagcacctgaactcctggggggaccgtcagtcttcctcttccccccaaaacccaaggacaccctcatgatctcccggacccctgaggtcacatgcgtggtggtggacgtgagccacgaagaccctgaggtcaagttcaactggtacgtggacggcgtggaggtgcataatgccaagacaaagccgcgggaggagcagtacaacagcacgtaccgtgtggtcagcgtcctcaccgtcctgcaccaggactggctgaatggcaaggagtacaagtgcaaggtctccaacaaagccctcccagcccccatcgagaaaaccatctccaaagccaaagggcagccccgagaaccacaggtgtacaccctgcccccatcccgggaggagatgaccaagaaccaggtcagcctgacctgcctggtcaaaggcttctatcccagcgacatcgccgtggagtgggagagcaatgggcagccggagaacaactacaagaccacgcctcccgtgctggactccgacggctccttcttcctctacagcaagctcaccgtggacaagagcaggtggcagcaggggaacgtcttctcatgctccgtgatgcacgaggctctgcacaaccactacacgcagaagagcctctccctgtctccgggt

SEQ ID NO: 228 - DNA, 852 bp, Artificial Sequence
  Description of Artificial Sequence: Synthetic polynucleotide
atgccacctcctcgcctcctcttcttcctcctcttcctcacccccatggaagtcaggcccgaggaacctctagtggtgaaggtggaagagggagataacgctgtgctgcagtgcctcaaggggacctcagatggccccactcagcagctgacctggtctcgggagtccccgcttaaacccttcttaaaactcagcctggggctgccaggcctgggaatccacatgaggcccctggccatctggcttttcatcttcaacgtctctcaacagatggggggcttctacctgtgccagccggggcccccctctgagaaggcctggcagcctggctggacagtcaatgtggagggcagcggggagctgttccggtggaatgtttcggacctaggtggcctgggctgtggcctgaagaacaggtcctcagagggccccagctccccttccgggaagctcatgagccccaagctgtatgtgtgggccaaagaccgccctgagatctgggagggagagcctccgtgtctcccaccgagggacagcctgaaccagagcctcagccaggacctcaccatggcccctggctccacactctggctgtcctgtggggtaccccctgactctgtgtccaggggccccctctcctggacccatgtgcaccccaaggggcctaagtcattgctgagcctagagctgaaggacgatcgcccggccagagatatgtgggtaatggagacgggtctgttgttgccccgggccacagctcaagacgctggaaagtattattgtcaccgtggcaacctgaccatgtcattccacctggagatcactgctcggccacatcatcaccatcaccat

SEQ ID NO: 229 - DNA, 1512 bp, Artificial Sequence
  Description of Artificial Sequence: Synthetic polynucleotide
atgccacctcctcgcctcctcttcttcctcctcttcctcacccccatggaagtcaggcccgaggaacctctagtggtgaaggtggaagagggagataacgctgtgctgcagtgcctcaaggggacctcagatggccccactcagcagctgacctggtctcgggagtccccgcttaaacccttcttaaaactcagcctggggctgccaggcctgggaatccacatgaggcccctggccatctggcttttcatcttcaacgtctctcaacagatggggggcttctacctgtgccagccggggcccccctctgagaaggcctggcagcctggctggacagtcaatgtggagggcagcggggagctgttccggtggaatgtttcggacctaggtggcctgggctgtggcctgaagaacaggtcctcagagggccccagctccccttccgggaagctcatgagccccaagctgtatgtgtgggccaaagaccgccctgagatctgggagggagagcctccgtgtctcccaccgagggacagcctgaaccagagcctcagccaggacctcaccatggcccctggctccacactctggctgtcctgtggggtaccccctgactctgtgtccaggggccccctctcctggacccatgtgcaccccaaggggcctaagtcattgctgagcctagagctgaaggacgatcgcccggccagagatatgtgggtaatggagacgggtctgttgttgccccgggccacagctcaagacgctggaaagtattattgtcaccgtggcaacctgaccatgtcattccacctggagatcactgctcggccagacaaaactcacacatgcccaccgtgcccagcacctgaactcctggggggaccgtcagtcttcctcttccccccaaaacccaaggacaccctcatgatctcccggacccctgaggtcacatgcgtggtggtggacgtgagccacgaagaccctgaggtcaagttcaactggtacgtggacggcgtggaggtgcataatgccaagacaaagccgcgggaggagcagtacaacagcacgtaccgtgtggtcagcgtcctcaccgtcctgcaccaggactggctgaatggcaaggagtacaagtgcaaggtctccaacaaagccctcccagcccccatcgagaaaaccatctccaaagccaaagggcagccccgagaaccacaggtgtacaccctgcccccatcccgggaggagatgaccaagaaccaggtcagcctgacctgcctggtcaaaggcttctatcccagcgacatcgccgtggagtgggagagcaatgggcagccggagaacaactacaagaccacgcctcccgtgctggactccgacggctccttcttcctctacagcaagctcaccgtggacaagagcaggtggcagcaggggaacgtcttctcatgctccgtgatgcacgaggctctgcacaaccactacacgcagaagagcctctccctgtctccgggt

SEQ ID NO: 230 - DNA, 384 bp, Artificial Sequence
  Description of Artificial Sequence: Synthetic polynucleotide
atgccacctcctcgcctcctcttcttcctcctcttcctcacccccatggaagtcaggccgagggacagcctgaaccagagcctcagccaggacctcaccatggcccctggctccacactctggctgtcctgtggggtaccccctgactctgtgtccaggggccccctctcctggacccatgtgcaccccaaggggcctaagtcattgctgagcctagagctgaaggacgatcgcccggccagagatatgtgggtaatggagacgggtctgttgttgccccgggccacagctcaagacgctggaaagtattattgtcaccgtggcaacctgaccatgtcattccacctggagatcactgctcggccacatcatcaccatcaccat

SEQ ID NO: 231 - DNA, 1044 bp, Artificial Sequence
  Description of Artificial Sequence: Synthetic polynucleotide
atgccacctcctcgcctcctcttcttcctcctcttcctcacccccatggaagtcaggccgagggacagcctgaaccagagcctcagccaggacctcaccatggcccctggctccacactctggctgtcctgtggggtaccccctgactctgtgtccaggggccccctctcctggacccatgtgcaccccaaggggcctaagtcattgctgagcctagagctgaaggacgatcgcccggccagagatatgtgggtaatggagacgggtctgttgttgccccgggccacagctcaagacgctggaaagtattattgtcaccgtggcaacctgaccatgtcattccacctggagatcactgctcggccagacaaaactcacacatgcccaccgtgcccagcacctgaactcctggggggaccgtcagtcttcctcttccccccaaaacccaaggacaccctcatgatctcccggacccctgaggtcacatgcgtggtggtggacgtgagccacgaagaccctgaggtcaagttcaactggtacgtggacggcgtggaggtgcataatgccaagacaaagccgcgggaggagcagtacaacagcacgtaccgtgtggtcagcgtcctcaccgtcctgcaccaggactggctgaatggcaaggagtacaagtgcaaggtctccaacaaagccctcccagcccccatcgagaaaaccatctccaaagccaaagggcagccccgagaaccacaggtgtacaccctgcccccatcccgggaggagatgaccaagaaccaggtcagcctgacctgcctggtcaaaggcttctatcccagcgacatcgccgtggagtgggagagcaatgggcagccggagaacaactacaagaccacgcctcccgtgctggactccgacggctccttcttcctctacagcaagctcaccgtggacaagagcaggtggcagcaggggaacgtcttctcatgctccgtgatgcacgaggctctgcacaaccactacacgcagaagagcctctccctgtctccgggt

SEQ ID NO: 232 - DNA, 1521 bp, Artificial Sequence
  Description of Artificial Sequence: Synthetic polynucleotide
atgccacctcctcgcctcctcttcttcctcctcttcctcacccccatggaagtcaggcccgaggaacctctagtggtgaaggtggaagagggagataacgctgtgctgcagtgcctcaaggggacctcagatggccccactcagcagctgacctggtctcgggagtccccgcttaaacccttcttaaaactcagcctggggctgccaggcctgggaatccacatgaggcccctggccatctggcttttcatcttcaacgtctctcaacagatggggggcttctacctgtgccagccggggcccccctctgagaaggcctggcagcctggctggacagtcaatgtggagggcagcggggagctgttccggtggaatgtttcggacctaggtggcctgggctgtggcctgaagaacaggtcctcagagggccccagctccccttccgggaagctcatgagccccaagctgtatgtgtgggccaaagaccgccctgagatctgggagggagagcctccgtgtctcccaccgagggacagcctgaaccagagcctcagccaggacctcaccatggcccctggctccacactctggctgtcctgtggggtaccccctgactctgtgtccaggggccccctctcctggacccatgtgcaccccaaggggcctaagtcattgctgagcctagagctgaaggacgatcgcccggccagagatatgtgggtaatggagacgggtctgttgttgccccgggccacagctcaagacgctggaaagtattattgtcaccgtggcaacctgaccatgtcattccacctggagatcactgctcggccaggaggaggtgggtctggaggtggaggatctggtggaggtgggtctgacatccagatgacccagtctccatcctccctgtctgcatctgtaggagacagagtcaccatcacttgccaggcgagtcaggacatcagcaactatttaaattggtatcagcagaaaccagggaaagcccctaaactcctgatctacgatgcatccaatttggaaacaggggtcccatcaaggttcagtggaagtggatctgggacagattttactttcaccatcagcagcctgcagcctgaagatattgcaacatatttctgtcaacactttgatcatctcccgctcgctttcggcggagggaccaaggtggagatcaaacgaactgtggctgcaccatctgtcttcatcttcccgccatctgatgagcagttgaaatctggaactgcctctgttgtgtgcctgctgaataacttctatcccagagaggccaaagtacagtggaaggtggataacgccctccaatcgggtaactcccaggagagtgtcacagagcaggacagcaaggacagcacctacagcctcagcagcaccctgacgctgagcaaagcagactacgagaaacacaaagtctacgcctgcgaagtcacccatcagggcctgagctcgcccgtcacaaagagcttcaacaggggagagtgt

SEQ ID NO: 233 - DNA, 2211 bp, Artificial Sequence
  Description of Artificial Sequence: Synthetic polynucleotide
atgccacctcctcgcctcctcttcttcctcctcttcctcacccccatggaagtcaggcccgaggaacctctagtggtgaaggtggaagagggagataacgctgtgctgcagtgcctcaaggggacctcagatggccccactcagcagctgacctggtctcgggagtccccgcttaaacccttcttaaaactcagcctggggctgccaggcctgggaatccacatgaggcccctggccatctggcttttcatcttcaacgtctctcaacagatggggggcttctacctgtgccagccggggcccccctctgagaaggcctggcagcctggctggacagtcaatgtggagggcagcggggagctgttccggtggaatgtttcggacctaggtggcctgggctgtggcctgaagaacaggtcctcagagggccccagctccccttccgggaagctcatgagccccaagctgtatgtgtgggccaaagaccgccctgagatctgggagggagagcctccgtgtctcccaccgagggacagcctgaaccagagcctcagccaggacctcaccatggcccctggctccacactctggctgtcctgtggggtaccccctgactctgtgtccaggggccccctctcctggacccatgtgcaccccaaggggcctaagtcattgctgagcctagagctgaaggacgatcgcccggccagagatatgtgggtaatggagacgggtctgttgttgccccgggccacagctcaagacgctggaaagtattattgtcaccgtggcaacctgaccatgtcattccacctggagatcactgctcggccaggaggaggtgggtctggaggtggaggatctggtggaggtgggtctcaggtgcagctgcaggagtcgggcccaggactggtgaagccttcggagaccctgtccctcacctgcactgtctctggtggctccgtcagcagtggtgattactactggacctggatccggcagtccccagggaagggactggagtggattggacacatctattacagtgggaacaccaattataacccctccctcaagagtcgactcaccatatcaattgacacgtccaagactcagttctccctgaagctgagttctgtgaccgctgcggacacggccatttattactgtgtgcgagatcgagtgactggtgcttttgatatctggggccaagggacaatggtcaccgtctcttcagcctccaccaagggcccatcggtcttccccctggcgccctgctccaggagcacctccgagagcacagcggccctgggctgcctggtcaaggactacttccctgaaccggtgacggtgtcgtggaactcaggcgctctgaccagcggcgtgcacaccttcccggctgtcctacagtcctcaggactctactccctcagcagcgtggtgaccgtgccctccagcaacttcggcacccagacctacacctgcaacgtagatcacaagcccagcaataccaaggtggacaagacagttgagcgcaaatgttgtgtcgagtgcccaccgtgcccagcaccacctgtggcaggaccgtcagtcttcctcttccccccaaaacccaaggacaccctcatgatctcccggacccctgaggtcacgtgcgtggtggtggacgtgagccacgaagaccccgaggtccagttcaactggtacgtggacggcgtggaggtgcataatgccaagacaaagccacgggaggagcagttccaaagcacgttccgtgtggtcagcgtcctcaccgtcgtgcaccaggactggctgaacggcaaggagtacaagtgcaaggtctccaacaaaggcctcccagcccccatcgagaaaaccatctccaaaaccaaagggcagccccgagaaccacaggtgtacaccctgcccccatcccgggaggagatgaccaagaaccaggtcagcctgacctgcctggtcaaaggcttctaccccagcgacatcgccgtggagtgggagagcaatgggcagccggagaacaactacaagaccacgcctcccatgctggactccgacggctccttcttcctctacagcaagctcaccgtggacaagagcaggtggcagcaggggaacgtcttctcatgctccgtgatgcatgaggctctgcacaaccactacacgcagaagagcctctccctgtctccgggt

SEQ ID NO: 234 - DNA, 1536 bp, Artificial Sequence
  Description of Artificial Sequence: Synthetic polynucleotide
atggagacagacacactcctgctatgggtactgctgctctgggttccaggttccactggtgacatccagatgacccagtctccatcctccctgtctgcatctgtaggagacagagtcaccatcacttgccaggcgagtcaggacatcagcaactatttaaattggtatcagcagaaaccagggaaagcccctaaactcctgatctacgatgcatccaatttggaaacaggggtcccatcaaggttcagtggaagtggatctgggacagattttactttcaccatcagcagcctgcagcctgaagatattgcaacatatttctgtcaacactttgatcatctcccgctcgctttcggcggagggaccaaggtggagatcaaacgaactgtggctgcaccatctgtcttcatcttcccgccatctgatgagcagttgaaatctggaactgcctctgttgtgtgcctgctgaataacttctatcccagagaggccaaagtacagtggaaggtggataacgccctccaatcgggtaactcccaggagagtgtcacagagcaggacagcaaggacagcacctacagcctcagcagcaccctgacgctgagcaaagcagactacgagaaacacaaagtctacgcctgcgaagtcacccatcagggcctgagctcgcccgtcacaaagagcttcaacaggggagagtgtgacaaaactcacacatcgccaccgtccccagcacctgaagccgcggggggaccgtcacccgaggaacctctagtggtgaaggtggaagagggagataacgctgtgctgcagtgcctcaaggggacctcagatggccccactcagcagctgacctggtctcgggagtccccgcttaaacccttcttaaaactcagcctggggctgccaggcctgggaatccacatgaggcccctggccatctggcttttcatcttcaacgtctctcaacagatggggggcttctacctgtgccagccggggcccccctctgagaaggcctggcagcctggctggacagtcaatgtggagggcagcggggagctgttccggtggaatgtttcggacctaggtggcctgggctgtggcctgaagaacaggtcctcagagggccccagctccccttccgggaagctcatgagccccaagctgtatgtgtgggccaaagaccgccctgagatctgggagggagagcctccgtgtctcccaccgagggacagcctgaaccagagcctcagccaggacctcaccatggcccctggctccacactctggctgtcctgtggggtaccccctgactctgtgtccaggggccccctctcctggacccatgtgcaccccaaggggcctaagtcattgctgagcctagagctgaaggacgatcgcccggccagagatatgtgggtaatggagacgggtctgttgttgccccgggccacagctcaagacgctggaaagtattattgtcaccgtggcaacctgaccatgtcattccacctggagatcactgctcggcca

SEQ ID NO: 235 - DNA, 2211 bp, Artificial Sequence
  Description of Artificial Sequence: Synthetic polynucleotide
atggagtttgggctgagctgggttttcctcgttgctctttttagaggtgtccagtgtcaggtgcagctgcaggagtcgggcccaggactggtgaagccttcggagaccctgtccctcacctgcactgtctctggtggctccgtcagcagtggtgattactactggacctggatccggcagtccccagggaagggactggagtggattggacacatctattacagtgggaacaccaattataacccctccctcaagagtcgactcaccatatcaattgacacgtccaagactcagttctccctgaagctgagttctgtgaccgctgcggacacggccatttattactgtgtgcgagatcgagtgactggtgcttttgatatctggggccaagggacaatggtcaccgtctcttcagcctccaccaagggcccatcggtcttccccctggcgccctgctccaggagcacctccgagagcacagcggccctgggctgcctggtcaaggactacttccctgaaccggtgacggtgtcgtggaactcaggcgctctgaccagcggcgtgcacaccttcccggctgtcctacagtcctcaggactctactccctcagcagcgtggtgaccgtgccctccagcaacttcggcacccagacctacacctgcaacgtagatcacaagcccagcaataccaaggtggacaagacagttgagcgcaaatgttgtgtcgagtgcccaccgtgcccagcaccacctgtggcaggaccgtcagtcttcctcttccccccaaaacccaaggacaccctcatgatctcccggacccctgaggtcacgtgcgtggtggtggacgtgagccacgaagaccccgaggtccagttcaactggtacgtggacggcgtggaggtgcataatgccaagacaaagccacgggaggagcagttccaaagcacgttccgtgtggtcagcgtcctcaccgtcgtgcaccaggactggctgaacggcaaggagtacaagtgcaaggtctccaacaaaggcctcccagcccccatcgagaaaaccatctccaaaaccaaagggcagccccgagaaccacaggtgtacaccctgcccccatcccgggaggagatgaccaagaaccaggtcagcctgacctgcctggtcaaaggcttctaccccagcgacatcgccgtggagtgggagagcaatgggcagccggagaacaactacaagaccacgcctcccatgctggactccgacggctccttcttcctctacagcaagctcaccgtggacaagagcaggtggcagcaggggaacgtcttctcatgctccgtgatgcatgaggctctgcacaaccactacacgcagaagagcctctccctgtctccgggtggtggaggtgggtctggaggtggaggatctggtggaggtgggtctcccgaggaacctctagtggtgaaggtggaagagggagataacgctgtgctgcagtgcctcaaggggacctcagatggccccactcagcagctgacctggtctcgggagtccccgcttaaacccttcttaaaactcagcctggggctgccaggcctgggaatccacatgaggcccctggccatctggcttttcatcttcaacgtctctcaacagatggggggcttctacctgtgccagccggggcccccctctgagaaggcctggcagcctggctggacagtcaatgtggagggcagcggggagctgttccggtggaatgtttcggacctaggtggcctgggctgtggcctgaagaacaggtcctcagagggccccagctccccttccgggaagctcatgagccccaagctgtatgtgtgggccaaagaccgccctgagatctgggagggagagcctccgtgtctcccaccgagggacagcctgaaccagagcctcagccaggacctcaccatggcccctggctccacactctggctgtcctgtggggtaccccctgactctgtgtccaggggccccctctcctggacccatgtgcaccccaaggggcctaagtcattgctgagcctagagctgaaggacgatcgcccggccagagatatgtgggtaatggagacgggtctgttgttgccccgggccacagctcaagacgctggaaagtattattgtcaccgtggcaacctgaccatgtcattccacctggagatcactgctcggcca

SEQ ID NO: 236 - DNA, 1525 bp, Artificial Sequence
  Description of Artificial Sequence: Synthetic polynucleotide
atgccacctcctcgcctcctcttcttcctcctcttcctcacccccatggaagtcaggcccgaggaacctctagtggtgaaggtggaagagggagataacgctgtgctgcagtgcctcaaggggacctcagatggccccactcagcagctgacctggtctcgggagtccccgcttaaacccttcttaaaactcagcctggggctgccaggcctgggaatccacatgaggcccctggccatctggcttttcatcttcaacgtctctcaacagatggggggcttctacctgtgccagccggggcccccctctgagaaggcctggcagcctggctggacagtcaatgtggagggcagcggggagctgttccggtggaatgtttcggacctaggtggcctgggctgtggcctgaagaacaggtcctcagagggccccagctccccttccgggaagctcatgagccccaagctgtatgtgtgggccaaagaccgccctgagatctgggagggagagcctccgtgtctcccaccgagggacagcctgaaccagagcctcagccaggacctcaccatggcccctggctccacactctggctgtcctgtggggtaccccctgactctgtgtccaggggccccctctcctggacccatgtgcaccccaaggggcctaagtcattgctgagcctagagctgaaggacgatcgcccggccagagatatgtgggtaatggagacgggtctgttgttgccccgggccacagctcaagacgctggaaagtattattgtcaccgtggcaacctgaccatgtcattccacctggagatcactgctcggccaggaggaggtgggtctggaggtggaggatctggtggaggtgggtctgacatccagatgacccagtctccatcctccctgtctgcatctgtaggagacagagtcaccatcacttgcagtgtcagctcaagtgtatcctccatttacttgcactggtatcagcagaaaccagggaaagcccctaagctcctgatctatagcacatccaacttggcttctggagtcccatcaaggttcagtggcagtggatctgggacagatttcactctcaccatcagcagtctgcaacctgaagattttgcaacttactactgtcaagtctacagtggttacccgctcacgttcggcggagggaccaaggtggagatcaaacgaactgtggctgcaccatctgtcttcatcttcccgccatctgatgagcagttgaaatctggaactgcctctgttgtgtgcctgctgaataacttctatcccagagaggccaaagtacagtggaaggtggataacgccctccaatcgggtaactcccaggagagtgtcacagagcaggacagcaaggacagcacctacagcctcagcagcaccctgacgctgagcaaagcagactacgagaaacacaaagtctacgcctgcgaagtcacccatcagggcctgagctcgcccgtcacaaagagcttcaacaggggagagtgct

SEQ ID NO: 237 - DNA, 2199 bp, Artificial Sequence
  Description of Artificial Sequence: Synthetic polynucleotide
atgccacctcctcgcctcctcttcttcctcctcttcctcacccccatggaagtcaggcccgaggaacctctagtggtgaaggtggaagagggagataacgctgtgctgcagtgcctcaaggggacctcagatggccccactcagcagctgacctggtctcgggagtccccgcttaaacccttcttaaaactcagcctggggctgccaggcctgggaatccacatgaggcccctggccatctggcttttcatcttcaacgtctctcaacagatggggggcttctacctgtgccagccggggcccccctctgagaaggcctggcagcctggctggacagtcaatgtggagggcagcggggagctgttccggtggaatgtttcggacctaggtggcctgggctgtggcctgaagaacaggtcctcagagggccccagctccccttccgggaagctcatgagccccaagctgtatgtgtgggccaaagaccgccctgagatctgggagggagagcctccgtgtctcccaccgagggacagcctgaaccagagcctcagccaggacctcaccatggcccctggctccacactctggctgtcctgtggggtaccccctgactctgtgtccaggggccccctctcctggacccatgtgcaccccaaggggcctaagtcattgctgagcctagagctgaaggacgatcgcccggccagagatatgtgggtaatggagacgggtctgttgttgccccgggccacagctcaagacgctggaaagtattattgtcaccgtggcaacctgaccatgtcattccacctggagatcactgctcggccaggaggaggtgggtctggaggtggaggatctggtggaggtgggtctcaggttcagctggtgcagtctggtgctgaggtgaagaagcctggtgcctcagtgaaggtctcctgcaaggcttctggttacacattcactgactactacatgcactgggtgcgtcaggcccctggtcaaggtcttgagtggatgggtcgtgttaatcctaaccggaggggtactacctacaaccagaaattcgagggccgtgtcaccatgaccacagacacatccacgagcacagcctacatggagctgcgtagcctgcgttctgacgacacggccgtgtattactgtgcgcgtgcgaactggcttgactactggggccagggcaccaccgtcaccgtctcctccgcctccaccaagggcccatcggtcttcccgctagcgccctgctccaggagcacctccgagagcacagccgccctgggctgcctggtcaaggactacttccccgaaccggtgacggtgtcgtggaactcaggcgccctgaccagcggcgtgcacaccttcccggctgtcctacagtcctcaggactctactccctcagcagcgtggtgaccgtgccctccagcagcttgggcacgaagacctacacctgcaacgtagatcacaagcccagcaacaccaaggtggacaagagagttgagtccaaatatggtcccccatgcccaccctgcccagcacctgaggccgccgggggaccatcagtcttcctgttccccccaaaacccaaggacactctcatgatctcccggacccctgaggtcacgtgcgtggtggtggacgtgagccaggaagaccccgaggtccagttcaactggtacgtggatggcgtggaggtgcataatgccaagacaaagccgcgggaggagcagttcaacagcacgtaccgtgtggtcagcgtcctcaccgtcctgcaccaggactggctgaacggcaaggagtacaagtgcaaggtctccaacaaaggcctcccgtcctccatcgagaaaaccatctccaaagccaaagggcagccccgagagccacaggtgtacaccctgcccccatcccaggaggagatgaccaagaaccaggtcagcctgacctgcctggtcaaaggcttctaccccagcgacatcgccgtggagtgggaaagcaatgggcagccggagaacaactacaagaccacgcctcccgtgctggactccgacggctccttcttcctctacagcaggctaaccgtggacaagagcaggtggcaggaggggaatgtcttctcatgctccgtgatgcatgaggctctgcacaaccactacacacagaagagcctctccctgtctctg

SEQ ID NO: 238 - DNA, 1539 bp, Artificial Sequence
  Description of Artificial Sequence: Synthetic polynucleotide
atggagacagacacactcctgctatgggtactgctgctctgggttccaggttccactggtgacatccagatgacccagtctccatcctccctgtctgcatctgtaggagacagagtcaccatcacttgcagtgtcagctcaagtgtatcctccatttacttgcactggtatcagcagaaaccagggaaagcccctaagctcctgatctatagcacatccaacttggcttctggagtcccatcaaggttcagtggcagtggatctgggacagatttcactctcaccatcagcagtctgcaacctgaagattttgcaacttactactgtcaagtctacagtggttacccgctcacgttcggcggagggaccaaggtggagatcaaacgaactgtggctgcaccatctgtcttcatcttcccgccatctgatgagcagttgaaatctggaactgcctctgttgtgtgcctgctgaataacttctatcccagagaggccaaagtacagtggaaggtggataacgccctccaatcgggtaactcccaggagagtgtcacagagcaggacagcaaggacagcacctacagcctcagcagcaccctgacgctgagcaaagcagactacgagaaacacaaagtctacgcctgcgaagtcacccatcagggcctgagctcgcccgtcacaaagagcttcaacaggggagagtgcgacaaaactcacacatcgccaccgtccccagcacctgaagccgcggggggaccgtcacccgaggaacctctagtggtgaaggtggaagagggagataacgctgtgctgcagtgcctcaaggggacctcagatggccccactcagcagctgacctggtctcgggagtccccgcttaaacccttcttaaaactcagcctggggctgccaggcctgggaatccacatgaggcccctggccatctggcttttcatcttcaacgtctctcaacagatggggggcttctacctgtgccagccggggcccccctctgagaaggcctggcagcctggctggacagtcaatgtggagggcagcggggagctgttccggtggaatgtttcggacctaggtggcctgggctgtggcctgaagaacaggtcctcagagggccccagctccccttccgggaagctcatgagccccaagctgtatgtgtgggccaaagaccgccctgagatctgggagggagagcctccgtgtctcccaccgagggacagcctgaaccagagcctcagccaggacctcaccatggcccctggctccacactctggctgtcctgtggggtaccccctgactctgtgtccaggggccccctctcctggacccatgtgcaccccaaggggcctaagtcattgctgagcctagagctgaaggacgatcgcccggccagagatatgtgggtaatggagacgggtctgttgttgccccgggccacagctcaagacgctggaaagtattattgtcaccgtggcaacctgaccatgtcattccacctggagatcactgctcggcca

SEQ ID NO: 239 - DNA, 2202 bp, Artificial Sequence
  Description of Artificial Sequence: Synthetic polynucleotide
atggagtttgggctgagctgggttttcctcgttgctctttttagaggtgtccagtgtcaggttcagctggtgcagtctggtgctgaggtgaagaagcctggtgcctcagtgaaggtctcctgcaaggcttctggttacacattcactgactactacatgcactgggtgcgtcaggcccctggtcaaggtcttgagtggatgggtcgtgttaatcctaaccggaggggtactacctacaaccagaaattcgagggccgtgtcaccatgaccacagacacatccacgagcacagcctacatggagctgcgtagcctgcgttctgacgacacggccgtgtattactgtgcgcgtgcgaactggcttgactactggggccagggcaccaccgtcaccgtctcctccgcctccaccaagggcccatcggtcttcccgctagcgccctgctccaggagcacctccgagagcacagccgccctgggctgcctggtcaaggactacttccccgaaccggtgacggtgtcgtggaactcaggcgccctgaccagcggcgtgcacaccttcccggctgtcctacagtcctcaggactctactccctcagcagcgtggtgaccgtgccctccagcagcttgggcacgaagacctacacctgcaacgtagatcacaagcccagcaacaccaaggtggacaagagagttgagtccaaatatggtcccccatgcccaccctgcccagcacctgaggccgccgggggaccatcagtcttcctgttccccccaaaacccaaggacactctcatgatctcccggacccctgaggtcacgtgcgtggtggtggacgtgagccaggaagaccccgaggtccagttcaactggtacgtggatggcgtggaggtgcataatgccaagacaaagccgcgggaggagcagttcaacagcacgtaccgtgtggtcagcgtcctcaccgtcctgcaccaggactggctgaacggcaaggagtacaagtgcaaggtctccaacaaaggcctcccgtcctccatcgagaaaaccatctccaaagccaaagggcagccccgagagccacaggtgtacaccctgcccccatcccaggaggagatgaccaagaaccaggtcagcctgacctgcctggtcaaaggcttctaccccagcgacatcgccgtggagtgggaaagcaatgggcagccggagaacaactacaagaccacgcctcccgtgctggactccgacggctccttcttcctctacagcaggctaaccgtggacaagagcaggtggcaggaggggaatgtcttctcatgctccgtgatgcatgaggctctgcacaaccactacacacagaagagcctctccctgtctctgggtggtggaggtgggtctggaggtggaggatctggtggaggtgggtctcccgaggaacctctagtggtgaaggtggaagagggagataacgctgtgctgcagtgcctcaaggggacctcagatggccccactcagcagctgacctggtctcgggagtccccgcttaaacccttcttaaaactcagcctggggctgccaggcctgggaatccacatgaggcccctggccatctggcttttcatcttcaacgtctctcaacagatggggggcttctacctgtgccagccggggcccccctctgagaaggcctggcagcctggctggacagtcaatgtggagggcagcggggagctgttccggtggaatgtttcggacctaggtggcctgggctgtggcctgaagaacaggtcctcagagggccccagctccccttccgggaagctcatgagccccaagctgtatgtgtgggccaaagaccgccctgagatctgggagggagagcctccgtgtctcccaccgagggacagcctgaaccagagcctcagccaggacctcaccatggcccctggctccacactctggctgtcctgtggggtaccccctgactctgtgtccaggggccccctctcctggacccatgtgcaccccaaggggcctaagtcattgctgagcctagagctgaaggacgatcgcccggccagagatatgtgggtaatggagacgggtctgttgttgccccgggccacagctcaagacgctggaaagtattattgtcaccgtggcaacctgaccatgtcattccacctggagatcactgctcggcca

SEQ ID NO: 240 - DNA, 1662 bp, Artificial Sequence
  Description of Artificial Sequence: Synthetic polynucleotide
atggagtttgggctgagctgggttttcctcgttgctctttttagaggtgtccagtgtgaggtgcagctggtggagtctggtggtggtcttgttcaacctggtggttctcttcgtctttcttgtgctgcttctggttttaatattaaagatacttatattcattgggttcgtcaagctcctggtaaaggtcttgaatgggttgctcgtatttatcctactaatggttatactcgttatgctgattctgttaaaggtcgttttactatttctgctgatacttctaaaaatactgcttatcttcaaatgaactctcttcgtgctgaagatactgctgtttattattgttctcgttggggtggtgatggtttttatgctatggattattggggtcaaggtactcttgtcaccgtctcctcagctagcaccgggggaggtgggtctggaggtggaggatctggtggaggtgggtctgacatccagatgacccagtctccttcttctctttctgcttctgttggtgatcgtgttactattacttgtcgtgcttctcaagatgttaatactgctgttgcttggtatcaacaaaaacctggtaaagctcctaaacttcttatttattctgcttcttttctttattctggtgttccttctcgtttttctggttctcgttctggtactgattttactcttactatttcttctcttcaacctgaagattttgctacttattattgtcaacaacattatactactcctcctacttttggtcaaggtaccaaggtggagatcaaacgtacggacaaaactcacacatcgccaccgtccccagcacctgaagccgcggggggaccgtcacccgaggaacctctagtggtgaaggtggaagagggagataacgctgtgctgcagtgcctcaaggggacctcagatggccccactcagcagctgacctggtctcgggagtccccgcttaaacccttcttaaaactcagcctggggctgccaggcctgggaatccacatgaggcccctggccatctggcttttcatcttcaacgtctctcaacagatggggggcttctacctgtgccagccggggcccccctctgagaaggcctggcagcctggctggacagtcaatgtggagggcagcggggagctgttccggtggaatgtttcggacctaggtggcctgggctgtggcctgaagaacaggtcctcagagggccccagctccccttccgggaagctcatgagccccaagctgtatgtgtgggccaaagaccgccctgagatctgggagggagagcctccgtgtctcccaccgagggacagcctgaaccagagcctcagccaggacctcaccatggcccctggctccacactctggctgtcctgtggggtaccccctgactctgtgtccaggggccccctctcctggacccatgtgcaccccaaggggcctaagtcattgctgagcctagagctgaaggacgatcgcccggccagagatatgtgggtaatggagacgggtctgttgttgccccgggccacagctcaagacgctggaaagtattattgtcaccgtggcaacctgaccatgtcattccacctggagatcactgctcggccatctagagggccccatcatcaccatcaccat

SEQ ID NO: 241 - DNA, 2310 bp, Artificial Sequence
  Description of Artificial Sequence: Synthetic polynucleotide
atggagtttgggctgagctgggttttcctcgttgctctttttagaggtgtccagtgtgaggtgcagctggtggagtctggtggtggtcttgttcaacctggtggttctcttcgtctttcttgtgctgcttctggttttaatattaaagatacttatattcattgggttcgtcaagctcctggtaaaggtcttgaatgggttgctcgtatttatcctactaatggttatactcgttatgctgattctgttaaaggtcgttttactatttctgctgatacttctaaaaatactgcttatcttcaaatgaactctcttcgtgctgaagatactgctgtttattattgttctcgttggggtggtgatggtttttatgctatggattattggggtcaaggtactcttgtcaccgtctcctcagctagcaccgggggaggtgggtctggaggtggaggatctggtggaggtgggtctgacatccagatgacccagtctccttcttctctttctgcttctgttggtgatcgtgttactattacttgtcgtgcttctcaagatgttaatactgctgttgcttggtatcaacaaaaacctggtaaagctcctaaacttcttatttattctgcttcttttctttattctggtgttccttctcgtttttctggttctcgttctggtactgattttactcttactatttcttctcttcaacctgaagattttgctacttattattgtcaacaacattatactactcctcctacttttggtcaaggtaccaaggtggagatcaaacgtacggacaaaactcacacatcgccaccgtccccagcacctgaagccgcggggggaccgtcacccgaggaacctctagtggtgaaggtggaagagggagataacgctgtgctgcagtgcctcaaggggacctcagatggccccactcagcagctgacctggtctcgggagtccccgcttaaacccttcttaaaactcagcctggggctgccaggcctgggaatccacatgaggcccctggccatctggcttttcatcttcaacgtctctcaacagatggggggcttctacctgtgccagccggggcccccctctgagaaggcctggcagcctggctggacagtcaatgtggagggcagcggggagctgttccggtggaatgtttcggacctaggtggcctgggctgtggcctgaagaacaggtcctcagagggccccagctccccttccgggaagctcatgagccccaagctgtatgtgtgggccaaagaccgccctgagatctgggagggagagcctccgtgtctcccaccgagggacagcctgaaccagagcctcagccaggacctcaccatggcccctggctccacactctggctgtcctgtggggtaccccctgactctgtgtccaggggccccctctcctggacccatgtgcaccccaaggggcctaagtcattgctgagcctagagctgaaggacgatcgcccggccagagatatgtgggtaatggagacgggtctgttgttgccccgggccacagctcaagacgctggaaagtattattgtcaccgtggcaacctgaccatgtcattccacctggagatcactgctcggccagacaaaactcacacatgcccaccgtgcccagcacctgaactcctggggggaccgtcagtcttcctcttccccccaaaacccaaggacaccctcatgatctcccggacccctgaggtcacatgcgtggtggtggacgtgagccacgaagaccctgaggtcaagttcaactggtacgtggacggcgtggaggtgcataatgccaagacaaagccgcgggaggagcagtacaacagcacgtaccgtgtggtcagcgtcctcaccgtcctgcaccaggactggctgaatggcaaggagtacaagtgcaaggtctccaacaaagccctcccagcccccatcgagaaaaccatctccaaagccaaagggcagccccgagaaccacaggtgtacaccctgcccccatcccgggaggagatgaccaagaaccaggtcagcctgacctgcctggtcaaaggcttctatcccagcgacatcgccgtggagtgggagagcaatgggcagccggagaacaactacaagaccacgcctcccgtgctggactccgacggctccttcttcctctacagcaagctcaccgtggacaagagcaggtggcagcaggggaacgtcttctcatgctccgtgatgcacgaggctctgcacaaccactacacgcagaagagcctctccctgtctccgggt

SEQ ID NO: 242 - DNA, 1665 bp, Artificial Sequence
  Description of Artificial Sequence: Synthetic polynucleotide
atgccacctcctcgcctcctcttcttcctcctcttcctcacccccatggaagtcaggcccgaggaacctctagtggtgaaggtggaagagggagataacgctgtgctgcagtgcctcaaggggacctcagatggccccactcagcagctgacctggtctcgggagtccccgcttaaacccttcttaaaactcagcctggggctgccaggcctgggaatccacatgaggcccctggccatctggcttttcatcttcaacgtctctcaacagatggggggcttctacctgtgccagccggggcccccctctgagaaggcctggcagcctggctggacagtcaatgtggagggcagcggggagctgttccggtggaatgtttcggacctaggtggcctgggctgtggcctgaagaacaggtcctcagagggccccagctccccttccgggaagctcatgagccccaagctgtatgtgtgggccaaagaccgccctgagatctgggagggagagcctccgtgtctcccaccgagggacagcctgaaccagagcctcagccaggacctcaccatggcccctggctccacactctggctgtcctgtggggtaccccctgactctgtgtccaggggccccctctcctggacccatgtgcaccccaaggggcctaagtcattgctgagcctagagctgaaggacgatcgcccggccagagatatgtgggtaatggagacgggtctgttgttgccccgggccacagctcaagacgctggaaagtattattgtcaccgtggcaacctgaccatgtcattccacctggagatcactgctcggccagggggaggtgggtctggaggtggaggatctggtggaggtgggtctggtggaggtgggtctgaggtgcagctggtggagtctggtggtggtcttgttcaacctggtggttctcttcgtctttcttgtgctgcttctggttttaatattaaagatacttatattcattgggttcgtcaagctcctggtaaaggtcttgaatgggttgctcgtatttatcctactaatggttatactcgttatgctgattctgttaaaggtcgttttactatttctgctgatacttctaaaaatactgcttatcttcaaatgaactctcttcgtgctgaagatactgctgtttattattgttctcgttggggtggtgatggtttttatgctatggattattggggtcaaggtactcttgtcaccgtctcctcagctagcaccgggggaggtgggtctggaggtggaggatctggtggaggtgggtctgacatccagatgacccagtctccttcttctctttctgcttctgttggtgatcgtgttactattacttgtcgtgcttctcaagatgttaatactgctgttgcttggtatcaacaaaaacctggtaaagctcctaaacttcttatttattctgcttcttttctttattctggtgttccttctcgtttttctggttctcgttctggtactgattttactcttactatttcttctcttcaacctgaagattttgctacttattattgtcaacaacattatactactcctcctacttttggtcaaggtaccaaggtggagatcaaacgtacgtctagagggccccatcatcaccatcaccat

SEQ ID NO: 243 - DNA, 2313 bp, Artificial Sequence
  Description of Artificial Sequence: Synthetic polynucleotide
atgccacctcctcgcctcctcttcttcctcctcttcctcacccccatggaagtcaggcccgaggaacctctagtggtgaaggtggaagagggagataacgctgtgctgcagtgcctcaaggggacctcagatggccccactcagcagctgacctggtctcgggagtccccgcttaaacccttcttaaaactcagcctggggctgccaggcctgggaatccacatgaggcccctggccatctggcttttcatcttcaacgtctctcaacagatggggggcttctacctgtgccagccggggcccccctctgagaaggcctggcagcctggctggacagtcaatgtggagggcagcggggagctgttccggtggaatgtttcggacctaggtggcctgggctgtggcctgaagaacaggtcctcagagggccccagctccccttccgggaagctcatgagccccaagctgtatgtgtgggccaaagaccgccctgagatctgggagggagagcctccgtgtctcccaccgagggacagcctgaaccagagcctcagccaggacctcaccatggcccctggctccacactctggctgtcctgtggggtaccccctgactctgtgtccaggggccccctctcctggacccatgtgcaccccaaggggcctaagtcattgctgagcctagagctgaaggacgatcgcccggccagagatatgtgggtaatggagacgggtctgttgttgccccgggccacagctcaagacgctggaaagtattattgtcaccgtggcaacctgaccatgtcattccacctggagatcactgctcggccagggggaggtgggtctggaggtggaggatctggtggaggtgggtctggtggaggtgggtctgaggtgcagctggtggagtctggtggtggtcttgttcaacctggtggttctcttcgtctttcttgtgctgcttctggttttaatattaaagatacttatattcattgggttcgtcaagctcctggtaaaggtcttgaatgggttgctcgtatttatcctactaatggttatactcgttatgctgattctgttaaaggtcgttttactatttctgctgatacttctaaaaatactgcttatcttcaaatgaactctcttcgtgctgaagatactgctgtttattattgttctcgttggggtggtgatggtttttatgctatggattattggggtcaaggtactcttgtcaccgtctcctcagctagcaccgggggaggtgggtctggaggtggaggatctggtggaggtgggtctgacatccagatgacccagtctccttcttctctttctgcttctgttggtgatcgtgttactattacttgtcgtgcttctcaagatgttaatactgctgttgcttggtatcaacaaaaacctggtaaagctcctaaacttcttatttattctgcttcttttctttattctggtgttccttctcgtttttctggttctcgttctggtactgattttactcttactatttcttctcttcaacctgaagattttgctacttattattgtcaacaacattatactactcctcctacttttggtcaaggtaccaaggtggagatcaaacgtacggacaaaactcacacatgcccaccgtgcccagcacctgaactcctggggggaccgtcagtcttcctcttccccccaaaacccaaggacaccctcatgatctcccggacccctgaggtcacatgcgtggtggtggacgtgagccacgaagaccctgaggtcaagttcaactggtacgtggacggcgtggaggtgcataatgccaagacaaagccgcgggaggagcagtacaacagcacgtaccgtgtggtcagcgtcctcaccgtcctgcaccaggactggctgaatggcaaggagtacaagtgcaaggtctccaacaaagccctcccagcccccatcgagaaaaccatctccaaagccaaagggcagccccgagaaccacaggtgtacaccctgcccccatcccgggaggagatgaccaagaaccaggtcagcctgacctgcctggtcaaaggcttctatcccagcgacatcgccgtggagtgggagagcaatgggcagccggagaacaactacaagaccacgcctcccgtgctggactccgacggctccttcttcctctacagcaagctcaccgtggacaagagcaggtggcagcaggggaacgtcttctcatgctccgtgatgcacgaggctctgcacaaccactacacgcagaagagcctctccctgtctccgggt

SEQ ID NO: 244-245 - skipped (2 entries)

SEQ ID NO: 246 - DNA, 1083 bp, Artificial Sequence
  Description of Artificial Sequence: Synthetic polynucleotide
aagcttaatttaaggcaggatgtctcagagtctgggaaaatcccactttcctcctgctacaccttacagttgtgagaaagcacatttcagacaacagggaaaacccatacttcaccacaacaacacactatacattgtctggtccactggagcataaattaaagagaaacaatgtagtcaagcaagtaggcggcaagaggaagggggcggagacatcatcagggagtataaactctgagatgcctcagagcctcacagactcaacaagagctccagcaaagactttcactgtagcttgacttgacctgagattaactagggaatcttgagaataaagaagcttaactagttagcggaccgacgcgtacgcggccgctcgagatggagagcgacgagagcggcctgcccgccatggagatcgagtgccgcatcaccggcaccctgaacggcgtggagttcgagctggtgggcggcggagagggcacccccgagcagggccgcatgaccaacaagatgaagagcaccaaaggcgccctgaccttcagcccctacctgctgagccacgtgatgggctacggcttctaccacttcggcacctaccccagcggctacgagaaccccttcctgcacgccatcaacaacggcggctacaccaacacccgcatcgagaagtacgaggacggcggcgtgctgcacgtgagcttcagctaccgctacgaggccggccgcgtgatcggcgacttcaaggtgatgggcaccggcttccccgaggacagcgtgatcttcaccgacaagatcatccgcagcaacgccaccgtggagcacctgcaccccatgggcgataacgatctggatggcagcttcacccgcaccttcagcctgcgcgacggcggctactacagctccgtggtggacagccacatgcacttcaagagcgccatccaccccagcatcctgcagaacgggggccccatgttcgccttccgccgcgtggaggaggatcacagcaacaccgagctgggcatcgtggagtaccagcacgccttcaagaccccggatgcagatgccggtgaagaaagagtt

SEQ ID NO: 247 - DNA, 1790 bp, Artificial Sequence
  Description of Artificial Sequence: Synthetic polynucleotide
aagctttaacgaagacagggccatgtagagggccccagggagtgaaagggcctccaggacctccaggtatggaatacaggggacgtttaagaagatatggccacacactggggccctgagaagtgagagcttcatgaaaaaaatcagggaccccagagttccttggaagccaagactgaaaccagcattatgagtctccgggtcagaatgaaagaagaaggcctgccccagtggggtctgtgaattcccgggggtgatttcactccccggggctgtcccaggcttgtccctgctacccccacccagcctttcctgaggcctcaagcctgccaccaagcccccagctccttctccccgcagggacccaaacacaggcctcgggactcaacacagcttttccctccaaccccgttttctctccctcaaggactcagctttctgaggcccctcccagttctagttctatctttttcctgcatcctgtctggaagttagaaggaaacagaccacagacctggtccccaaaagaaatggaggcaataggttttgaggggcatggggacggggttcagcctccagggtcctacacacaaatcagtcagtggcccagaagaccccctcggaatcggagcagggaggatggggagtgtgaggggtatccttgatgcttgtgtgtccccaactttccaaatccccgcccccgcgatggagaagaaaccgagacagaaggtgcagggcccactaccgcttcctccagatgagctcatgggtttctccaccaaggaagttttccgctggttgaatgattctttccccgccctcctctcgccccagggacatataaaggcagttgttggcacacccagccagcagacgctccctcagcaaggacagcagaggaccagctaagagggagagaagcaactacagaccccccctgaaaacaaccctcagacgccacatcccctgacaagctgccaggcaggttctcttcctctcacatactgacccacggctccaccctctctcccctggaaaggacacaagcttaactagttagcggaccgacgcgtacgcggccgctcgagatggagagcgacgagagcggcctgcccgccatggagatcgagtgccgcatcaccggcaccctgaacggcgtggagttcgagctggtgggcggcggagagggcacccccgagcagggccgcatgaccaacaagatgaagagcaccaaaggcgccctgaccttcagcccctacctgctgagccacgtgatgggctacggcttctaccacttcggcacctaccccagcggctacgagaaccccttcctgcacgccatcaacaacggcggctacaccaacacccgcatcgagaagtacgaggacggcggcgtgctgcacgtgagcttcagctaccgctacgaggccggccgcgtgatcggcgacttcaaggtgatgggcaccggcttccccgaggacagcgtgatcttcaccgacaagatcatccgcagcaacgccaccgtggagcacctgcaccccatgggcgataacgatctggatggcagcttcacccgcaccttcagcctgcgcgacggcggctactacagctccgtggtggacagccacatgcacttcaagagcgccatccaccccagcatcctgcagaacgggggccccatgttcgccttccgccgcgtggaggaggatcacagcaacaccgagctgggcatcgtggagtaccagcacgccttcaagaccccggatgcagatgccggtgaagaaagagtt

SEQ ID NO: 248 - DNA, 1519 bp, Artificial Sequence
  Description of Artificial Sequence: Synthetic polynucleotide
aagcttgggagaagctagacttaaaatcttccattgcagctgtaaacacatctggacaatagtctgttttctgcatttgtgaatcccacacccatggaactatgaatcgtgcatcagagttatttaaaaccaccgtgcatggagtgaaccaataccgaggtgtttgcttatcattttcctttgagcacacagcacagccttgaactcagtgacactcctaagagggctctagggtcaggccaacttagatgagatgctagtctttagctaaagatgcccttccacccccgttgcacgaccttgcttctcagtctttgttgagtcttctgggggagaatccccctagaggactcagtttacaaaaccctaagtgagaccactgccaagaagtgcttgctcacccctcctgccgcggcagggaatccccctttccttgtacaggcaaaacacaaaaaaggactcataagtgaagcctgatccttctcaccaaacactgcccacacctcctagtaattgaacttgaaaaaaaaaactggtttgaaaaattaccgcaaaccatattgtcataaaaaaaaaaaaaaacacttcctatatgagatcacagaacagagtaggcacaagttcctgctgagcagatcagcctaatgcttaaatagaacaactcctggctgtcattgacattgtctaaaagccaagatgacagactgagaggcctgagcccttgttctggcattctcccaggaagatgcagtaaaggggttgacccaatatacaagcttaactagttagcggaccgacgcgtacgcggccgctcgagatggagagcgacgagagcggcctgcccgccatggagatcgagtgccgcatcaccggcaccctgaacggcgtggagttcgagctggtgggcggcggagagggcacccccgagcagggccgcatgaccaacaagatgaagagcaccaaaggcgccctgaccttcagcccctacctgctgagccacgtgatgggctacggcttctaccacttcggcacctaccccagcggctacgagaaccccttcctgcacgccatcaacaacggcggctacaccaacacccgcatcgagaagtacgaggacggcggcgtgctgcacgtgagcttcagctaccgctacgaggccggccgcgtgatcggcgacttcaaggtgatgggcaccggcttccccgaggacagcgtgatcttcaccgacaagatcatccgcagcaacgccaccgtggagcacctgcaccccatgggcgataacgatctggatggcagcttcacccgcaccttcagcctgcgcgacggcggctactacagctccgtggtggacagccacatgcacttcaagagcgccatccaccccagcatcctgcagaacgggggccccatgttcgccttccgccgcgtggaggaggatcacagcaacaccgagctgggcatcgtggagtaccagcacgccttcaagaccccggatgcagatgccggtgaagaaagagtt

SEQ ID NO: 249 - DNA, 1115 bp, Artificial Sequence
  Description of Artificial Sequence: Synthetic polynucleotide
aagcttgatatcgaattaggaggaaaactgtttcatacagaaggcgtcaattaggaggaaaaactgtttcatacagaaggcgtcaattaggaggaaaaactgtttcatacagaaggcgtcaattggtcccatcgaattaggaggaaaaactgtttcatacagaaggcgtcaattaggaggaaaaactgtttcatacagaaggcgtcaattaggaggaaaaactgtttcatacagaaggcgtcaattggtcccgggacattttgacacccccataatatttttccagaattaacagtataaattgcatctcttgttcaagagttccctatcactctctttaatcactactcacagtaacctcaactcctgaagcttaactagttagcggaccgacgcgtacgcggccgctcgagatggagagcgacgagagcggcctgcccgccatggagatcgagtgccgcatcaccggcaccctgaacggcgtggagttcgagctggtgggcggcggagagggcacccccgagcagggccgcatgaccaacaagatgaagagcaccaaaggcgccctgaccttcagcccctacctgctgagccacgtgatgggctacggcttctaccacttcggcacctaccccagcggctacgagaaccccttcctgcacgccatcaacaacggcggctacaccaacacccgcatcgagaagtacgaggacggcggcgtgctgcacgtgagcttcagctaccgctacgaggccggccgcgtgatcggcgacttcaaggtgatgggcaccggcttccccgaggacagcgtgatcttcaccgacaagatcatccgcagcaacgccaccgtggagcacctgcaccccatgggcgataacgatctggatggcagcttcacccgcaccttcagcctgcgcgacggcggctactacagctccgtggtggacagccacatgcacttcaagagcgccatccaccccagcatcctgcagaacgggggccccatgttcgccttccgccgcgtggaggaggatcacagcaacaccgagctgggcatcgtggagtaccagcacgccttcaagaccccggatgcagatgccggtgaagaaagagtt

SEQ ID NO: 250 - DNA, 2265 bp, Artificial Sequence
  Description of Artificial Sequence: Synthetic polynucleotide
atgccacctcctcgcctcctcttcttcctcctcttcctcacccccatggaagtcaggcccgaggaacctctagtggtgaaggtggaagagggagataacgctgtgctgcagtgcctcaaggggacctcagatggccccactcagcagctgacctggtctcgggagtccccgcttaaacccttcttaaaactcagcctggggctgccaggcctgggaatccacatgaggcccctggccatctggcttttcatcttcaacgtctctcaacagatggggggcttctacctgtgccagccggggcccccctctgagaaggcctggcagcctggctggacagtcaatgtggagggcagcggggagctgttccggtggaatgtttcggacctaggtggcctgggctgtggcctgaagaacaggtcctcagagggccccagctccccttccgggaagctcatgagccccaagctgtatgtgtgggccaaagaccgccctgagatctgggagggagagcctccgtgtctcccaccgagggacagcctgaaccagagcctcagccaggacctcaccatggcccctggctccacactctggctgtcctgtggggtaccccctgactctgtgtccaggggccccctctcctggacccatgtgcaccccaaggggcctaagtcattgctgagcctagagctgaaggacgatcgcccggccagagatatgtgggtaatggagacgggtctgttgttgccccgggccacagctcaagacgctggaaagtattattgtcaccgtggcaacctgaccatgtcattccacctggagatcactgctcggccagtactatggcactggctgctgaggactggtggctggaagggaggaggtgggtctggaggtggaggatctggtggaggtgggtctggaggaggtgggtctcaggtgcagctgcaggagtcgggcccaggactggtgaagccttcggagaccctgtccctcacctgcactgtctctggtggctccgtcagcagtggtgattactactggacctggatccggcagtccccagggaagggactggagtggattggacacatctattacagtgggaacaccaattataacccctccctcaagagtcgactcaccatatcaattgacacgtccaagactcagttctccctgaagctgagttctgtgaccgctgcggacacggccatttattactgtgtgcgagatcgagtgactggtgcttttgatatctggggccaagggacaatggtcaccgtctcttcagcctccaccaagggcccatcggtcttccccctggcgccctgctccaggagcacctccgagagcacagcggccctgggctgcctggtcaaggactacttccctgaaccggtgacggtgtcgtggaactcaggcgctctgaccagcggcgtgcacaccttcccggctgtcctacagtcctcaggactctactccctcagcagcgtggtgaccgtgccctccagcaacttcggcacccagacctacacctgcaacgtagatcacaagcccagcaataccaaggtggacaagacagttgagcgcaaatgttgtgtcgagtgcccaccgtgcccagcaccacctgtggcaggaccgtcagtcttcctcttccccccaaaacccaaggacaccctcatgatctcccggacccctgaggtcacgtgcgtggtggtggacgtgagccacgaagaccccgaggtccagttcaactggtacgtggacggcgtggaggtgcataatgccaagacaaagccacgggaggagcagttccaaagcacgttccgtgtggtcagcgtcctcaccgtcgtgcaccaggactggctgaacggcaaggagtacaagtgcaaggtctccaacaaaggcctcccagcccccatcgagaaaaccatctccaaaaccaaagggcagccccgagaaccacaggtgtacaccctgcccccatcccgggaggagatgaccaagaaccaggtcagcctgacctgcctggtcaaaggcttctaccccagcgacatcgccgtggagtgggagagcaatgggcagccggagaacaactacaagaccacgcctcccatgctggactccgacggctccttcttcctctacagcaagctcaccgtggacaagagcaggtggcagcaggggaacgtcttctcatgctccgtgatgcatgaggctctgcacaaccactacacgcagaagagcctctccctgtctccgggt

SEQ ID NO: 251 - DNA, 2253 bp, Artificial Sequence
  Description of Artificial Sequence: Synthetic polynucleotide
atgccacctcctcgcctcctcttcttcctcctcttcctcacccccatggaagtcaggcccgaggaacctctagtggtgaaggtggaagagggagataacgctgtgctgcagtgcctcaaggggacctcagatggccccactcagcagctgacctggtctcgggagtccccgcttaaacccttcttaaaactcagcctggggctgccaggcctgggaatccacatgaggcccctggccatctggcttttcatcttcaacgtctctcaacagatggggggcttctacctgtgccagccggggcccccctctgagaaggcctggcagcctggctggacagtcaatgtggagggcagcggggagctgttccggtggaatgtttcggacctaggtggcctgggctgtggcctgaagaacaggtcctcagagggccccagctccccttccgggaagctcatgagccccaagctgtatgtgtgggccaaagaccgccctgagatctgggagggagagcctccgtgtctcccaccgagggacagcctgaaccagagcctcagccaggacctcaccatggcccctggctccacactctggctgtcctgtggggtaccccctgactctgtgtccaggggccccctctcctggacccatgtgcaccccaaggggcctaagtcattgctgagcctagagctgaaggacgatcgcccggccagagatatgtgggtaatggagacgggtctgttgttgccccgggccacagctcaagacgctggaaagtattattgtcaccgtggcaacctgaccatgtcattccacctggagatcactgctcggccagtactatggcactggctgctgaggactggtggctggaagggaggaggtgggtctggaggaggtgggtctggaggtggaggatctggtggaggtgggtctcaggttcagctggtgcagtctggtgctgaggtgaagaagcctggtgcctcagtgaaggtctcctgcaaggcttctggttacacattcactgactactacatgcactgggtgcgtcaggcccctggtcaaggtcttgagtggatgggtcgtgttaatcctaaccggaggggtactacctacaaccagaaattcgagggccgtgtcaccatgaccacagacacatccacgagcacagcctacatggagctgcgtagcctgcgttctgacgacacggccgtgtattactgtgcgcgtgcgaactggcttgactactggggccagggcaccaccgtcaccgtctcctccgcctccaccaagggcccatcggtcttcccgctagcgccctgctccaggagcacctccgagagcacagccgccctgggctgcctggtcaaggactacttccccgaaccggtgacggtgtcgtggaactcaggcgccctgaccagcggcgtgcacaccttcccggctgtcctacagtcctcaggactctactccctcagcagcgtggtgaccgtgccctccagcagcttgggcacgaagacctacacctgcaacgtagatcacaagcccagcaacaccaaggtggacaagagagttgagtccaaatatggtcccccatgcccaccctgcccagcacctgaggccgccgggggaccatcagtcttcctgttccccccaaaacccaaggacactctcatgatctcccggacccctgaggtcacgtgcgtggtggtggacgtgagccaggaagaccccgaggtccagttcaactggtacgtggatggcgtggaggtgcataatgccaagacaaagccgcgggaggagcagttcaacagcacgtaccgtgtggtcagcgtcctcaccgtcctgcaccaggactggctgaacggcaaggagtacaagtgcaaggtctccaacaaaggcctcccgtcctccatcgagaaaaccatctccaaagccaaagggcagccccgagagccacaggtgtacaccctgcccccatcccaggaggagatgaccaagaaccaggtcagcctgacctgcctggtcaaaggcttctaccccagcgacatcgccgtggagtgggaaagcaatgggcagccggagaacaactacaagaccacgcctcccgtgctggactccgacggctccttcttcctctacagcaggctaaccgtggacaagagcaggtggcaggaggggaatgtcttctcatgctccgtgatgcatgaggctctgcacaaccactacacacagaagagcctctccctgtctctg

SEQ ID NO: 252 - DNA, 1710 bp, Artificial Sequence
  Description of Artificial Sequence: Synthetic polynucleotide
atgccacctcctcgcctcctcttcttcctcctcttcctcacccccatggaagtcaggcccgaggaacctctagtggtgaaggtggaagagggagataacgctgtgctgcagtgcctcaaggggacctcagatggccccactcagcagctgacctggtctcgggagtccccgcttaaacccttcttaaaactcagcctggggctgccaggcctgggaatccacatgaggcccctggccatctggcttttcatcttcaacgtctctcaacagatggggggcttctacctgtgccagccggggcccccctctgagaaggcctggcagcctggctggacagtcaatgtggagggcagcggggagctgttccggtggaatgtttcggacctaggtggcctgggctgtggcctgaagaacaggtcctcagagggccccagctccccttccgggaagctcatgagccccaagctgtatgtgtgggccaaagaccgccctgagatctgggagggagagcctccgtgtctcccaccgagggacagcctgaaccagagcctcagccaggacctcaccatggcccctggctccacactctggctgtcctgtggggtaccccctgactctgtgtccaggggccccctctcctggacccatgtgcaccccaaggggcctaagtcattgctgagcctagagctgaaggacgatcgcccggccagagatatgtgggtaatggagacgggtctgttgttgccccgggccacagctcaagacgctggaaagtattattgtcaccgtggcaacctgaccatgtcattccacctggagatcactgctcggccagtactatggcactggctgctgaggactggtggctggaagggaggaggtgggtctggaggtggaggatctggtggaggtgggtctggaggaggtgggtctcaggtgcagctggtgcagagcggcgccgaggacaagaagcccggcgagagcgtgaagatcagctgcaaggccagcggctacaccttcaccaactacggcatgaactgggtgaggcaggcccccggccagggcctgaagtggatgggctggatcaacacctacaccggcgagagcacctacgccgacgacttcaagggcaggttcgccttcagcctggacaccagcgccagcaccgcctacctgcagctgagcagcctgaggggcgaggacaccgccgtgtacttctgcgccaggttcgccatcaagggcgactactggggccagggcaccaccgtgaccgtgagcagcgccagcaccggcggcggcggcagcggcggcggcggcagcggcggcggcggcagcggcggcggcggcagcgacatcgtgatgacccagagccccctgagcctggaggtgagccccggcgagcccgccagcatcagctgcaggagcaccaagagcctgctgcacagcgacggcatcacctacctgtactggtacctgcagaagcccggccagagcccccagctgctgatctaccagctgagcaacctggccagcggcgtgcccgacaggttcagcagcagcggcagcggcaccgacttcaccctgaagatcagcagggtggaggccgaggacgagggcacctactactgcgcccagaacctggagatccccaggaccttcggccagggcaccaagctggagatcaagaggacccatcatcaccatcaccat

SEQ ID NO: 253 - DNA, 1695 bp, Artificial Sequence
  Description of Artificial Sequence: Synthetic polynucleotide
atgccacctcctcgcctcctcttcttcctcctcttcctcacccccatggaagtcaggcccgaggaacctctagtggtgaaggtggaagagggagataacgctgtgctgcagtgcctcaaggggacctcagatggccccactcagcagctgacctggtctcgggagtccccgcttaaacccttcttaaaactcagcctggggctgccaggcctgggaatccacatgaggcccctggccatctggcttttcatcttcaacgtctctcaacagatggggggcttctacctgtgccagccggggcccccctctgagaaggcctggcagcctggctggacagtcaatgtggagggcagcggggagctgttccggtggaatgtttcggacctaggtggcctgggctgtggcctgaagaacaggtcctcagagggccccagctccccttccgggaagctcatgagccccaagctgtatgtgtgggccaaagaccgccctgagatctgggagggagagcctccgtgtctcccaccgagggacagcctgaaccagagcctcagccaggacctcaccatggcccctggctccacactctggctgtcctgtggggtaccccctgactctgtgtccaggggccccctctcctggacccatgtgcaccccaaggggcctaagtcattgctgagcctagagctgaaggacgatcgcccggccagagatatgtgggtaatggagacgggtctgttgttgccccgggccacagctcaagacgctggaaagtattattgtcaccgtggcaacctgaccatgtcattccacctggagatcactgctcggccagtactatggcactggctgctgaggactggtggctggaagggaggaggtgggtctggaggtggaggatctggtggaggtgggtctggaggaggtgggtctcaggttcagctggtgcagtctggtgctgaggatgtgaagcctgatgcctcagtgaagctctcctgcaaggcttctggttacacattcactgactactacatgcactgggtgcgtcaggcccctggtcaaggtcttgagtggatgggtcgtgttaatcctaaccggaggggtactacctacaaccagaaattcgagggccgtgtcaccatgaccacagacacatccacgagcacagcctacatgcagctgagtagcctgcgtggtgaagacacggccgtgtattactgtgcgcgtgcgaactggcttgactactggggccagggcaccaccgtcaccgtctcctccgcctccaccgggggaggtgggtctggaggtggaggatctggtggaggtgggtctggtggaggtgggtctgacatccagatgacccagtctccatcctccctggaggcatctgtaggagacagagtcaccatcacttgcagtgtcagctcaagtgtatcctccatttacttgcactggtatcagcagaaaccagggaaaagccctaagctcctgatctatagcacatccaacttggcttctggagtcccagataggttcagtggcagtggatctgggacagatttcactctcaccatcagcagtctgcaagccgaagatgagggcacttactactgtcaagtctacagtggttacccgctcacgttcggcggagggaccaagctggagatcaaacgaactcatcatcaccatcaccat

SEQ ID NO: 254 - DNA, 1704 bp, Artificial Sequence
  Description of Artificial Sequence: Synthetic polynucleotide
atgccacctcctcgcctcctcttcttcctcctcttcctcacccccatggaagtcaggcccgaggaacctctagtggtgaaggtggaagagggagataacgctgtgctgcagtgcctcaaggggacctcagatggccccactcagcagctgacctggtctcgggagtccccgcttaaacccttcttaaaactcagcctggggctgccaggcctgggaatccacatgaggcccctggccatctggcttttcatcttcaacgtctctcaacagatggggggcttctacctgtgccagccggggcccccctctgagaaggcctggcagcctggctggacagtcaatgtggagggcagcggggagctgttccggtggaatgtttcggacctaggtggcctgggctgtggcctgaagaacaggtcctcagagggccccagctccccttccgggaagctcatgagccccaagctgtatgtgtgggccaaagaccgccctgagatctgggagggagagcctccgtgtctcccaccgagggacagcctgaaccagagcctcagccaggacctcaccatggcccctggctccacactctggctgtcctgtggggtaccccctgactctgtgtccaggggccccctctcctggacccatgtgcaccccaaggggcctaagtcattgctgagcctagagctgaaggacgatcgcccggccagagatatgtgggtaatggagacgggtctgttgttgccccgggccacagctcaagacgctggaaagtattattgtcaccgtggcaacctgaccatgtcattccacctggagatcactgctcggccagtactatggcactggctgctgaggactggtggctggaagggaggaggtgggtctggaggtggaggatctggtggaggtgggtctggaggaggtgggtctcaggtgcagctgcaggagagcggccccggcgacgtgaagcccagcgagaccctgagcctgacctgcaccgtgagcggcggcagcgtgagcagcggcgactactactggacctggatcaggcagagccccggcaagggcctggagtggatcggccacatctactacagcggcaacaccaactacaaccccagcctgaagagcaggctgaccatcagcatcgacaccagcaagaccaccttcagcctgcagctgagcagcgtgaccggcgaggacaccgccatctactactgcgtgagggacagggtgaccggcgccttcgacatctggggccagggcaccaccgtgaccgtgagcagcgccagcaccggcggcggcggcagcggcggcggcggcagcggcggcggcggcagcggcggcggcggcagcgacatccagatgacccagagccccagcagcctggaggccagcgtgggcgacagggtgaccatcacctgccaggccagccaggacatcagcaactacctgaactggtaccagcagaagcccggcaagagccccaagctgctgatctacgacgccagcaacctggagaccggcgtgcccgacaggttcagcggcagcggcagcggcaccgacttcaccttcaccatcagcagcctgcaggccgaggacgagggcacctacttctgccagcacttcgaccacctgcccctggccttcggcggcggcaccaagctggagatcaagaggacccatcatcaccatcaccat

SEQ ID NO: 255 - DNA, 1692 bp, Artificial Sequence
  Description of Artificial Sequence: Synthetic polynucleotide
atgccacctcctcgcctcctcttcttcctcctcttcctcacccccatggaagtcaggcccgaggaacctctagtggtgaaggtggaagagggagataacgctgtgctgcagtgcctcaaggggacctcagatggccccactcagcagctgacctggtctcgggagtccccgcttaaacccttcttaaaactcagcctggggctgccaggcctgggaatccacatgaggcccctggccatctggcttttcatcttcaacgtctctcaacagatggggggcttctacctgtgccagccggggcccccctctgagaaggcctggcagcctggctggacagtcaatgtggagggcagcggggagctgttccggtggaatgtttcggacctaggtggcctgggctgtggcctgaagaacaggtcctcagagggccccagctccccttccgggaagctcatgagccccaagctgtatgtgtgggccaaagaccgccctgagatctgggagggagagcctccgtgtctcccaccgagggacagcctgaaccagagcctcagccaggacctcaccatggcccctggctccacactctggctgtcctgtggggtaccccctgactctgtgtccaggggccccctctcctggacccatgtgcaccccaaggggcctaagtcattgctgagcctagagctgaaggacgatcgcccggccagagatatgtgggtaatggagacgggtctgttgttgccccgggccacagctcaagacgctggaaagtattattgtcaccgtggcaacctgaccatgtcattccacctggagatcactgctcggccagtactatggcactggctgctgaggactggtggctggaaggggggaggtgggtctggaggtggaggatctggtggaggtgggtctggtggaggtgggtctgaggtgcagctggtggagtctggtggtggtcttgttcaacctggtggttctcttcgtctttcttgtgctgcttctggttttaatattaaagatacttatattcattgggttcgtcaagctcctggtaaaggtcttgaatgggttgctcgtatttatcctactaatggttatactcgttatgctgattctgttaaaggtcgttttactatttctgctgatacttctaaaaatactgcttatcttcaaatgaactctcttcgtgctgaagatactgctgtttattattgttctcgttggggtggtgatggtttttatgctatggattattggggtcaaggtactcttgtcaccgtctcctcagctagcaccgggggaggtgggtctggaggtggaggatctggtggaggtgggtctgacatccagatgacccagtctccttcttctctttctgcttctgttggtgatcgtgttactattacttgtcgtgcttctcaagatgttaatactgctgttgcttggtatcaacaaaaacctggtaaagctcctaaacttcttatttattctgcttcttttctttattctggtgttccttctcgtttttctggttctcgttctggtactgattttactcttactatttcttctcttcaacctgaagattttgctacttattattgtcaacaacattatactactcctcctacttttggtcaaggtaccaaggtggagatcaaacgtacgcatcatcaccatcaccat

SEQ ID NO: 256 - DNA, 2352 bp, Artificial Sequence
  Description of Artificial Sequence: Synthetic polynucleotide
atgccacctcctcgcctcctcttcttcctcctcttcctcacccccatggaagtcaggcccgaggaacctctagtggtgaaggtggaagagggagataacgctgtgctgcagtgcctcaaggggacctcagatggccccactcagcagctgacctggtctcgggagtccccgcttaaacccttcttaaaactcagcctggggctgccaggcctgggaatccacatgaggcccctggccatctggcttttcatcttcaacgtctctcaacagatggggggcttctacctgtgccagccggggcccccctctgagaaggcctggcagcctggctggacagtcaatgtggagggcagcggggagctgttccggtggaatgtttcggacctaggtggcctgggctgtggcctgaagaacaggtcctcagagggccccagctccccttccgggaagctcatgagccccaagctgtatgtgtgggccaaagaccgccctgagatctgggagggagagcctccgtgtctcccaccgagggacagcctgaaccagagcctcagccaggacctcaccatggcccctggctccacactctggctgtcctgtggggtaccccctgactctgtgtccaggggccccctctcctggacccatgtgcaccccaaggggcctaagtcattgctgagcctagagctgaaggacgatcgcccggccagagatatgtgggtaatggagacgggtctgttgttgccccgggccacagctcaagacgctggaaagtattattgtcaccgtggcaacctgaccatgtcattccacctggagatcactgctcggccagtactatggcactggctgctgaggactggtggctggaaggacaaaactcacacatgcccaccgtgcccagcacctgaactcctggggggaccgtcagtcttcctcttccccccaaaacccaaggacaccctcatgatctcccggacccctgaggtcacatgcgtggtggtggacgtgagccacgaagaccctgaggtcaagttcaactggtacgtggacggcgtggaggtgcataatgccaagacaaagccgcgggaggagcagtacaacagcacgtaccgtgtggtcagcgtcctcaccgtcctgcaccaggactggctgaatggcaaggagtacaagtgcaaggtctccaacaaagccctcccagcccccatcgagaaaaccatctccaaagccaaagggcagccccgagaaccacaggtgtacaccctgcccccatcccgggaggagatgaccaagaaccaggtcagcctgacctgcctggtcaaaggcttctatcccagcgacatcgccgtggagtgggagagcaatgggcagccggagaacaactacaagaccacgcctcccgtgctggactccgacggctccttcttcctctacagcaagctcaccgtggacaagagcaggtggcagcaggggaacgtcttctcatgctccgtgatgcacgaggctctgcacaaccactacacgcagaagagcctctccctgtctccgggtggaggaggtgggtctggaggtggaggatctggtggaggtgggtctggaggaggtgggtctgaggtgcagctggtggagtctggtggtggtcttgttcaacctggtggttctcttcgtctttcttgtgctgcttctggttttaatattaaagatacttatattcattgggttcgtcaagctcctggtaaaggtcttgaatgggttgctcgtatttatcctactaatggttatactcgttatgctgattctgttaaaggtcgttttactatttctgctgatacttctaaaaatactgcttatcttcaaatgaactctcttcgtgctgaagatactgctgtttattattgttctcgttggggtggtgatggtttttatgctatggattattggggtcaaggtactcttgtcaccgtctcctcagctagcaccgggggaggtgggtctggaggtggaggatctggtggaggtgggtctgacatccagatgacccagtctccttcttctctttctgcttctgttggtgatcgtgttactattacttgtcgtgcttctcaagatgttaatactgctgttgcttggtatcaacaaaaacctggtaaagctcctaaacttcttatttattctgcttcttttctttattctggtgttccttctcgtttttctggttctcgttctggtactgattttactcttactatttcttctcttcaacctgaagattttgctacttattattgtcaacaacattatactactcctcctacttttggtcaaggtaccaaggtggagatcaaacgtacg

SEQ ID NO: 257 - DNA, 2787 bp, Artificial Sequence
  Description of Artificial Sequence: Synthetic polynucleotide
atggagctggcggccttgtgccgctgggggctcctcctcgccctcttgccccccggagccgcgagcacccaagtgtgcaccggcacagacatgaagctgcggctccctgccagtcccgagacccacctggacatgctccgccacctctaccagggctgccaggtggtgcagggaaacctggaactcacctacctgcccaccaatgccagcctgtccttcctgcaggatatccaggaggtgcagggctacgtgctcatcgctcacaaccaagtgaggcaggtcccactgcagaggctgcggattgtgcgaggcacccagctctttgaggacaactatgccctggccgtgctagacaatggagacccgctgaacaataccacccctgtcacaggggcctccccaggaggcctgcgggagctgcagcttcgaagcctcacagagatcttgaaaggaggggtcttgatccagcggaacccccagctctgctaccaggacacgattttgtggaaggacatcttccacaagaacaaccagctggctctcacactgatagacaccaaccgctctcgggcctgccacccctgttctccgatgtgtaagggctcccgctgctggggagagagttctgaggattgtcagagcctgacgcgcactgtctgtgccggtggctgtgcccgctgcaaggggccactgcccactgactgctgccatgagcagtgtgctgccggctgcacgggccccaagcactctgactgcctggcctgcctccacttcaaccacagtggcatctgtgagctgcactgcccagccctggtcacctacaacacagacacgtttgagtccatgcccaatcccgagggccggtatacattcggcgccagctgtgtgactgcctgtccctacaactacctttctacggacgtgggatcctgcaccctcgtctgccccctgcacaaccaagaggtgacagcagaggatggaacacagcggtgtgagaagtgcagcaagccctgtgcccgagtgtgctatggtctgggcatggagcacttgcgagaggtgagggcagttaccagtgccaatatccaggagtttgctggctgcaagaagatctttgggagcctggcatttctgccggagagctttgatggggacccagcctccaacactgccccgctccagccagagcagctccaagtgtttgagactctggaagagatcacaggttacctatacatctcagcatggccggacagcctgcctgacctcagcgtcttccagaacctgcaagtaatccggggacgaattctgcacaatggcgcctactcgctgaccctgcaagggctgggcatcagctggctggggctgcgctcactgagggaactgggcagtggactggccctcatccaccataacacccacctctgcttcgtgcacacggtgccctgggaccagctctttcggaacccgcaccaagctctgctccacactgccaaccggccagaggacgagtgtgtgggcgagggcctggcctgccaccagctgtgcgcccgagggcactgctggggtccagggcccacccagtgtgtcaactgcagccagttccttcggggccaggagtgcgtggaggaatgccgagtactgcaggggctccccagggagtatgtgaatgccaggcactgtttgccgtgccaccctgagtgtcagccccagaatggctcagtgacctgttttggaccggaggctgaccagtgtgtggcctgtgcccactataaggaccctcccttctgcgtggcccgctgccccagcggtgtgaaacctgacctctcctacatgcccatctggaagtttccagatgaggagggcgcatgccagccttgccccatcaactgcacccactcctgtgtggacctggatgacaagggctgccccgccgagcagagagccagccctctgacgggaggaggtgggtctggaggtggaggatctggtggaggtgggtctggaggaggtgggtctcaggtgcagctgcaggagagcggccccggcgacgtgaagcccagcgagaccctgagcctgacctgcaccgtgagcggcggcagcgtgagcagcggcgactactactggacctggatcaggcagagccccggcaagggcctggagtggatcggccacatctactacagcggcaacaccaactacaaccccagcctgaagagcaggctgaccatcagcatcgacaccagcaagaccaccttcagcctgcagctgagcagcgtgaccggcgaggacaccgccatctactactgcgtgagggacagggtgaccggcgccttcgacatctggggccagggcaccaccgtgaccgtgagcagcgccagcaccggcggcggcggcagcggcggcggcggcagcggcggcggcggcagcggcggcggcggcagcgacatccagatgacccagagccccagcagcctggaggccagcgtgggcgacagggtgaccatcacctgccaggccagccaggacatcagcaactacctgaactggtaccagcagaagcccggcaagagccccaagctgctgatctacgacgccagcaacctggagaccggcgtgcccgacaggttcagcggcagcggcagcggcaccgacttcaccttcaccatcagcagcctgcaggccgaggacgagggcacctacttctgccagcacttcgaccacctgcccctggccttcggcggcggcaccaagctggagatcaagaggacccatcatcaccatcaccat

SEQ ID NO: 258 - DNA, 1362 bp, Artificial Sequence
  Description of Artificial Sequence: Synthetic polynucleotide
atggagctggcggccttgtgccgctgggggctcctcctcgccctcttgccccccggagccgcgagcaaccggccagaggacgagtgtgtgggcgagggcctggcctgccaccagctgtgcgcccgagggcactgctggggtccagggcccacccagtgtgtcaactgcagccagttccttcggggccaggagtgcgtggaggaatgccgagtactgcaggggctccccagggagtatgtgaatgccaggcactgtttgccgtgccaccctgagtgtcagccccagaatggctcagtgacctgttttggaccggaggctgaccagtgtgtggcctgtgcccactataaggaccctcccttctgcgtggcccgctgccccagcggtgtgaaacctgacctctcctacatgcccatctggaagtttccagatgaggagggcgcatgccagccttgccccatcaactgcacccactcctgtgtggacctggatgacaagggctgccccgccgagcagagagccagccctctgacgggaggaggtgggtctggaggtggaggatctggtggaggtgggtctggaggaggtgggtctcaggtgcagctgcaggagagcggccccggcgacgtgaagcccagcgagaccctgagcctgacctgcaccgtgagcggcggcagcgtgagcagcggcgactactactggacctggatcaggcagagccccggcaagggcctggagtggatcggccacatctactacagcggcaacaccaactacaaccccagcctgaagagcaggctgaccatcagcatcgacaccagcaagaccaccttcagcctgcagctgagcagcgtgaccggcgaggacaccgccatctactactgcgtgagggacagggtgaccggcgccttcgacatctggggccagggcaccaccgtgaccgtgagcagcgccagcaccggcggcggcggcagcggcggcggcggcagcggcggcggcggcagcggcggcggcggcagcgacatccagatgacccagagccccagcagcctggaggccagcgtgggcgacagggtgaccatcacctgccaggccagccaggacatcagcaactacctgaactggtaccagcagaagcccggcaagagccccaagctgctgatctacgacgccagcaacctggagaccggcgtgcccgacaggttcagcggcagcggcagcggcaccgacttcaccttcaccatcagcagcctgcaggccgaggacgagggcacctacttctgccagcacttcgaccacctgcccctggccttcggcggcggcaccaagctggagatcaagaggacccatcatcaccatcaccat

SEQ ID NO: 259-262 - skipped (4 entries)

SEQ ID NO: 263 - DNA, 1689 bp, Artificial Sequence
  Description of Artificial Sequence: Synthetic polynucleotide
atgccacctcctcgcctcctcttcttcctcctcttcctcacccccatggaagtcaggcccgaggaacctctagtggtgaaggtggaagagggagataacgctgtgctgcagtgcctcaaggggacctcagatggccccactcagcagctgacctggtctcgggagtccccgcttaaacccttcttaaaactcagcctggggctgccaggcctgggaatccacatgaggcccctggccatctggcttttcatcttcaacgtctctcaacagatggggggcttctacctgtgccagccggggcccccctctgagaaggcctggcagcctggctggacagtcaatgtggagggcagcggggagctgttccggtggaatgtttcggacctaggtggcctgggctgtggcctgaagaacaggtcctcagagggccccagctccccttccgggaagctcatgagccccaagctgtatgtgtgggccaaagaccgccctgagatctgggagggagagcctccgtgtctcccaccgagggacagcctgaaccagagcctcagccaggacctcaccatggcccctggctccacactctggctgtcctgtggggtaccccctgactctgtgtccaggggccccctctcctggacccatgtgcaccccaaggggcctaagtcattgctgagcctagagctgaaggacgatcgcccggccagagatatgtgggtaatggagacgggtctgttgttgccccgggccacagctcaagacgctggaaagtattattgtcaccgtggcaacctgaccatgtcattccacctggagatcactgctcggccagtactatggcactggctgctgaggactggtggctggaagggaggaggtgggtctggaggtggaggatctggtggaggtgggtctggaggaggtgggtctgaggtgcagctgcagcagtctggggctgagctggtgaagcctggggcctcagtgaagatgtcctgcaaggcttctggctacacatttaccagttacaatatgcactgggtaaagcagacacctggacagggcctggaatggattggagctatttatccaggaaatggtgatacttcctacaatcagaagttcaaaggcaaggccacattgactgcagacaaatcctccagcacagcctacatgcagctcagcagcctgacatctgaggactctgcggactattactgtgcaagatctaattattacggtagtagctactggttcttcgatgtctggggcgcagggaccacggtcaccgtctcctcaggcagtactagcggtggtggctccgggggcggttccggtgggggcggcagcagcgacattgtgctgacccaatctccagctatcctgtctgcatctccaggggagaaggtcacaatgacttgcagggccagctcaagtgtaaattacatggactggtaccagaagaagccaggatcctcccccaaaccctggatttatgccacatccaacctggcttctggagtccctgctcgcttcagtggcagtgggtctgggacctcttactctctcacaatcagcagagtggaggctgaagatgctgccacttattactgccagcagtggagttttaatccacccacgttcggaggggggaccaagctggaaataaaacatcatcaccatcaccat

SEQ ID NO: 264 - DNA, 1815 bp, Artificial Sequence
  Description of Artificial Sequence: Synthetic polynucleotide
atgcatctcctcggcccctggctcctgctcctggttctagaatacttggctttctctgactcaagtaaatgggtttttgagcaccctgaaaccctctacgcctgggagggggcctgcgtctggatcccctgcacctacagagccctagatggtgacctggaaagcttcatcctgttccacaatcctgagtataacaagaacacctcgaagtttgatgggacaagactctatgaaagcacaaaggatgggaaggttccttctgagcagaaaagggtgcaattcctgggagacaagaataaggcctgcacactgagtatccacccggtgcacctcaatgacagtggtcagctggggctgaggatggagtccaagactgagaaatggatggaacgaatacacctcaatgtctctgaaaggccttttccacctcatatccagctccctccagaaattcaagagtcccaggaagtcactctgacctgcttgctgaatttctcctgctatgggtatccgatccaattgcagtggctcctagagggggttccaatgaggcaggctgctgtcacctcgacctccttgaccatcaagtctgtcttcacccggagcgagctcaagttctccccacagtggagtcaccatgggaagattgtgacctgccagcttcaggatgcagatgggaagttcctctccaatgacacggtgcagctgaacgtgaagcacaccccgaagttggagatcaaggtcactcccagtgatgccatagtgagggagggggactctgtgaccatgacctgcgaggtcagcagcagcaacccggagtacacgacggtatcctggctcaaggatgggacctcgctgaagaagcagaatacattcacgctaaacctgcgcgaagtgaccaaggaccagagtgggaagtactgctgtcaggtctccaatgacgtgggcccgggaaggtcggaagaagtgttcctgcaagtgcagtatgccccggaaggaggaggtgggtctggaggtggaggatctggtggaggtgggtctggaggaggtgggtctgacatccagatgacacagactacatcctccctgtctgcctctctgggagacagagtcaccatcagttgcagggcaagtcaggacattagtaaatatttaaattggtatcagcagaaaccagatggaactgttaaactcctgatctaccatacatcaagattacactcaggagtcccatcaaggttcagtggcagtgggtctggaacagattattctctcaccattagcaacctggagcaagaagatattgccacttacttttgccaacagggtaatacgcttccgtacacgttcggaggggggactaagttggaaataacaggaggaggtgggtctggaggtggaggatctggtggaggtgggtctggaggaggtgggtctgaggtgaaactgcaggagtcaggacctggcctggtggcgccctcacagagcctgtccgtcacatgcactgtctcaggggtctcattacccgactatggtgtaagctggattcgccagcctccacgaaagggtctggagtggctgggagtaatatggggtagtgaaaccacatactataattcagctctcaaatccagactgaccatcatcaaggacaactccaagagccaagttttcttaaaaatgaacagtctgcaaactgatgacacagccatttactactgtgccaaacattattactacggtggtagctatgctatggactactggggtcaaggaacctcagtcaccgtctcctcacatcatcaccatcaccat

SEQ ID NO: 265 - DNA, 1812 bp, Artificial Sequence
  Description of Artificial Sequence: Synthetic polynucleotide
atgcatctcctcggcccctggctcctgctcctggttctagaatacttggctttctctgactcaagtaaatgggtttttgagcaccctgaaaccctctacgcctgggagggggcctgcgtctggatcccctgcacctacagagccctagatggtgacctggaaagcttcatcctgttccacaatcctgagtataacaagaacacctcgaagtttgatgggacaagactctatgaaagcacaaaggatgggaaggttccttctgagcagaaaagggtgcaattcctgggagacaagaataaggcctgcacactgagtatccacccggtgcacctcaatgacagtggtcagctggggctgaggatggagtccaagactgagaaatggatggaacgaatacacctcaatgtctctgaaaggccttttccacctcatatccagctccctccagaaattcaagagtcccaggaagtcactctgacctgcttgctgaatttctcctgctatgggtatccgatccaattgcagtggctcctagagggggttccaatgaggcaggctgctgtcacctcgacctccttgaccatcaagtctgtcttcacccggagcgagctcaagttctccccacagtggagtcaccatgggaagattgtgacctgccagcttcaggatgcagatgggaagttcctctccaatgacacggtgcagctgaacgtgaagcacaccccgaagttggagatcaaggtcactcccagtgatgccatagtgagggagggggactctgtgaccatgacctgcgaggtcagcagcagcaacccggagtacacgacggtatcctggctcaaggatgggacctcgctgaagaagcagaatacattcacgctaaacctgcgcgaagtgaccaaggaccagagtgggaagtactgctgtcaggtctccaatgacgtgggcccgggaaggtcggaagaagtgttcctgcaagtgcagtatgccccggaaggaggaggtgggtctggaggtggaggatctggtggaggtgggtctggaggaggtgggtctgaggtgcagctgcagcagtctggggctgagctggtgaagcctggggcctcagtgaagatgtcctgcaaggcttctggctacacatttaccagttacaatatgcactgggtaaagcagacacctggacagggcctggaatggattggagctatttatccaggaaatggtgatacttcctacaatcagaagttcaaaggcaaggccacattgactgcagacaaatcctccagcacagcctacatgcagctcagcagcctgacatctgaggactctgcggactattactgtgcaagatctaattattacggtagtagctactggttcttcgatgtctggggcgcagggaccacggtcaccgtctcctcaggcagtactagcggtggtggctccgggggcggttccggtgggggcggcagcagcgacattgtgctgacccaatctccagctatcctgtctgcatctccaggggagaaggtcacaatgacttgcagggccagctcaagtgtaaattacatggactggtaccagaagaagccaggatcctcccccaaaccctggatttatgccacatccaacctggcttctggagtccctgctcgcttcagtggcagtgggtctgggacctcttactctctcacaatcagcagagtggaggctgaagatgctgccacttattactgccagcagtggagttttaatccacccacgttcggaggggggaccaagctggaaataaaacatcatcaccatcaccat

SEQ ID NO: 266 - DNA, 1340 bp, Artificial Sequence
  Description of Artificial Sequence: Synthetic polynucleotide
aagcttgttgacattgattattgactagttattaatagtaatcaattacggggtcattagttcatagcccatatatggagttccgcgttacataacttacggtaaatggcccgcctggctgaccgcccaacgacccccgcccattgacgtcaataatgacgtatgttcccatagtaacgccaatagggactttccattgacgtcaatgggtggagtatttacggtaaactgcccacttggcagtacatcaagtgtatcatatgccaagtacgccccctattgacgtcaatgacggtaaatggcccgcctggcattatgcccagtacatgaccttatgggactttcctacttggcagtacatctacgtattagtcatcgctattaccatggtgatgcggttttggcagtacatcaatgggcgtggatagcggtttgactcacggggatttccaagtctccaccccattgacgtcaatgggagtttgttttggcaccaaaatcaacgggactttccaaaatgtcgtaacaactccgccccattgacgcaaatgggcggtaggcgtgtacggtgggaggtctatataagcagagctcaagcttaactagttagcggaccgacgcgtacgcggccgctcgagatggagagcgacgagagcggcctgcccgccatggagatcgagtgccgcatcaccggcaccctgaacggcgtggagttcgagctggtgggcggcggagagggcacccccgagcagggccgcatgaccaacaagatgaagagcaccaaaggcgccctgaccttcagcccctacctgctgagccacgtgatgggctacggcttctaccacttcggcacctaccccagcggctacgagaaccccttcctgcacgccatcaacaacggcggctacaccaacacccgcatcgagaagtacgaggacggcggcgtgctgcacgtgagcttcagctaccgctacgaggccggccgcgtgatcggcgacttcaaggtgatgggcaccggcttccccgaggacagcgtgatcttcaccgacaagatcatccgcagcaacgccaccgtggagcacctgcaccccatgggcgataacgatctggatggcagcttcacccgcaccttcagcctgcgcgacggcggctactacagctccgtggtggacagccacatgcacttcaagagcgccatccaccccagcatcctgcagaacgggggccccatgttcgccttccgccgcgtggaggaggatcacagcaacaccgagctgggcatcgtggagtaccagcacgccttcaagaccccggatgcagatgccggtgaagaaagagtt

SEQ ID NO: 267 - DNA, 1737 bp, Artificial Sequence
  Description of Artificial Sequence: Synthetic polynucleotide
atgccacctcctcgcctcctcttcttcctcctcttcctcacccccatggaagtcaggcccgaggaacctctagtggtgaaggtggaagagggagataacgctgtgctgcagtgcctcaaggggacctcagatggccccactcagcagctgacctggtctcgggagtccccgcttaaacccttcttaaaactcagcctggggctgccaggcctgggaatccacatgaggcccctggccatctggcttttcatcttcaacgtctctcaacagatggggggcttctacctgtgccagccggggcccccctctgagaaggcctggcagcctggctggacagtcaatgtggagggcagcggggagctgttccggtggaatgtttcggacctaggtggcctgggctgtggcctgaagaacaggtcctcagagggccccagctccccttccgggaagctcatgagccccaagctgtatgtgtgggccaaagaccgccctgagatctgggagggagagcctccgtgtctcccaccgagggacagcctgaaccagagcctcagccaggacctcaccatggcccctggctccacactctggctgtcctgtggggtaccccctgactctgtgtccaggggccccctctcctggacccatgtgcaccccaaggggcctaagtcattgctgagcctagagctgaaggacgatcgcccggccagagatatgtgggtaatggagacgggtctgttgttgccccgggccacagctcaagacgctggaaagtattattgtcaccgtggcaacctgaccatgtcattccacctggagatcactgctcggccagtactatggcactggctgctgaggactggtggctggaagggaggaggtgggtctggaggtggaggatctggtggaggtgggtctggaggaggtgggtctgacatcctgatgacccaatctccatcctccatgtctgtatctctgggagacacagtcagcatcacttgccattcaagtcaggacattaacagtaatatagggtggttgcagcagagaccagggaaatcatttaagggcctgatctatcatggaaccaacttggacgatgaagttccatcaaggttcagtggcagtggatctggagccgattattctctcaccatcagcagcctggaatctgaagattttgcagactattactgtgtacagtatgctcagtttccgtggacgttcggtggaggcaccaagctcgaaatcaaacgtggaggaggtgggtctggaggtggaggatctggtggaggtgggtctggaggaggtgggtctatgagagtgctgattcttttgtggctgttcacagcctttcctggtgtcctgtctgatgtgcagcttcaggagtcgggacctagcctggtgaaaccttctcagtctctgtccctcacctgcactgtcactggctactcaatcaccagtgattttgcctggaactggatccggcagtttccaggaaacaagctggagtggatgggctacataagttatagtggtaacactaggtacaacccatctctcaaaagtcgaatctctatcactcgagacacatccaagaaccaattcttcctgcagttgaattctgtgactattgaggacacagccacatattactgtgtaacggcgggacgcgggtttccttattggggccaagggactctggtcactgtctctgcacatcatcaccatcaccat

SEQ ID NO: 268 - DNA, 1860 bp, Artificial Sequence
  Description of Artificial Sequence: Synthetic polynucleotide
atgcatctcctcggcccctggctcctgctcctggttctagaatacttggctttctctgactcaagtaaatgggtttttgagcaccctgaaaccctctacgcctgggagggggcctgcgtctggatcccctgcacctacagagccctagatggtgacctggaaagcttcatcctgttccacaatcctgagtataacaagaacacctcgaagtttgatgggacaagactctatgaaagcacaaaggatgggaaggttccttctgagcagaaaagggtgcaattcctgggagacaagaataaggcctgcacactgagtatccacccggtgcacctcaatgacagtggtcagctggggctgaggatggagtccaagactgagaaatggatggaacgaatacacctcaatgtctctgaaaggccttttccacctcatatccagctccctccagaaattcaagagtcccaggaagtcactctgacctgcttgctgaatttctcctgctatgggtatccgatccaattgcagtggctcctagagggggttccaatgaggcaggctgctgtcacctcgacctccttgaccatcaagtctgtcttcacccggagcgagctcaagttctccccacagtggagtcaccatgggaagattgtgacctgccagcttcaggatgcagatgggaagttcctctccaatgacacggtgcagctgaacgtgaagcacaccccgaagttggagatcaaggtcactcccagtgatgccatagtgagggagggggactctgtgaccatgacctgcgaggtcagcagcagcaacccggagtacacgacggtatcctggctcaaggatgggacctcgctgaagaagcagaatacattcacgctaaacctgcgcgaagtgaccaaggaccagagtgggaagtactgctgtcaggtctccaatgacgtgggcccgggaaggtcggaagaagtgttcctgcaagtgcagtatgccccggaaggaggaggtgggtctggaggtggaggatctggtggaggtgggtctggaggaggtgggtctgacatcctgatgacccaatctccatcctccatgtctgtatctctgggagacacagtcagcatcacttgccattcaagtcaggacattaacagtaatatagggtggttgcagcagagaccagggaaatcatttaagggcctgatctatcatggaaccaacttggacgatgaagttccatcaaggttcagtggcagtggatctggagccgattattctctcaccatcagcagcctggaatctgaagattttgcagactattactgtgtacagtatgctcagtttccgtggacgttcggtggaggcaccaagctcgaaatcaaacgtggaggaggtgggtctggaggtggaggatctggtggaggtgggtctggaggaggtgggtctatgagagtgctgattcttttgtggctgttcacagcctttcctggtgtcctgtctgatgtgcagcttcaggagtcgggacctagcctggtgaaaccttctcagtctctgtccctcacctgcactgtcactggctactcaatcaccagtgattttgcctggaactggatccggcagtttccaggaaacaagctggagtggatgggctacataagttatagtggtaacactaggtacaacccatctctcaaaagtcgaatctctatcactcgagacacatccaagaaccaattcttcctgcagttgaattctgtgactattgaggacacagccacatattactgtgtaacggcgggacgcgggtttccttattggggccaagggactctggtcactgtctctgcacatcatcaccatcaccat

SEQ ID NO: 269-270 - skipped (2 entries)

SEQ ID NO: 271 - DNA, 1605 bp, Artificial Sequence
  Description of Artificial Sequence: Synthetic polynucleotide
atgctcaggctgctcttggctctcaacttattcccttcaattcaagtaacaggagacatccagatgacacagactacatcctccctgtctgcctctctgggagacagagtcaccatcagttgcagggcaagtcaggacattagtaaatatttaaattggtatcagcagaaaccagatggaactgttaaactcctgatctaccatacatcaagattacactcaggagtcccatcaaggttcagtggcagtgggtctggaacagattattctctcaccattagcaacctggagcaagaagatattgccacttacttttgccaacagggtaatacgcttccgtacacgttcggaggggggactaagttggaaataacaggaggaggtgggtctggaggtggaggatctggtggaggtgggtctggaggaggtgggtctgaggtgaaactgcaggagtcaggacctggcctggtggcgccctcacagagcctgtccgtcacatgcactgtctcaggggtctcattacccgactatggtgtaagctggattcgccagcctccacgaaagggtctggagtggctgggagtaatatggggtagtgaaaccacatactataattcagctctcaaatccagactgaccatcatcaaggacaactccaagagccaagttttcttaaaaatgaacagtctgcaaactgatgacacagccatttactactgtgccaaacattattactacggtggtagctatgctatggactactggggtcaaggaacctcagtcaccgtctcctcagactacaaagacgatgacgacaagattgaagttatgtatcctcctccttacctagacaatgagaagagcaatggaaccattatccatgtgaaagggaaacacctttgtccaagtcccctatttcccggaccttctaagcccttttgggtgctggtggtggttggtggagtcctggcttgctatagcttgctagtaacagtggcctttattattttctgggtgaggagtaagaggagcaggctcctgcacagtgactacatgaacatgactccccgccgccccgggcccacccgcaagcattaccagccctatgccccaccacgcgacttcgcagcctatcgctccaaacggggcagaaagaaactcctgtatatattcaaacaaccatttatgagaccagtacaaactactcaagaggaagatggctgtagctgccgatttccagaagaagaagaaggaggatgtgaactgagagtgaagttcagcaggagcgcagacgcccccgcgtaccagcagggccagaaccagctctataacgagctcaatctaggacgaagagaggagtacgatgttttggacaagagacgtggccgggaccctgagatggggggaaagccgcagagaaggaagaaccctcaggaaggcctgtacaatgaactgcagaaagataagatggcggaggcctacagtgagattgggatgaaaggcgagcgccggaggggcaaggggcacgatggcctttaccagggtctcagtacagccaccaaggacacctacgacgcccttcacatgcaggccctgccccctcgc

SEQ ID NO: 272 - DNA, 1605 bp, Artificial Sequence; identical to SEQ ID NO: 271
  Description of Artificial Sequence: Synthetic polynucleotide

SEQ ID NO: 273 - DNA, 2232 bp, Artificial Sequence
  Description of Artificial Sequence: Synthetic polynucleotide
tattaatagtaatcaattacggggtcattagttcatagcccatatatggagttccgcgttacataacttacggtaaatggcccgcctggctgaccgcccaacgacccccgcccattgacgtcaataatgacgtatgttcccatagtaacgccaatagggactttccattgacgtcaatgggtggagtatttacggtaaactgcccacttggcagtacatcaagtgtatcatatgccaagtacgccccctattgacgtcaatgacggtaaatggcccgcctggcattatgcccagtacatgaccttatgggactttcctacttggcagtacatctacgtattagtcatcgctattaccatggtgatgcggttttggcagtacatcaatgggcgtggatagcggtttgactcacggggatttccaagtctccaccccattgacgtcaatgggagtttgttttggcaccaaaatcaacgggactttccaaaatgtcgtaacaactccgccccattgacgcaaatgggcggtaggcgtgtacggtgggaggtctatataagcagagctcgcggccgcgccaccatgccacctcctcgcctcctcttcttcctcctcttcctcacccccatggaagtcaggcccgaggaacctctagtggtgaaggtggaagagggagataacgctgtgctgcagtgcctcaaggggacctcagatggccccactcagcagctgacttggtctcgggagtccccgcttaaacccttcttaaaactcagcctggggctgccaggcctgggaatccacatgaggcccctggccatctggcttttcatcttcaacgtctctcaacagatggggggcttctacctgtgccagccggggcccccctctgagaaggcctggcagcctggctggacagtcaatgtggagggcagcggggagctgttccggtggaatgtttcggacctaggtggcctgggctgtggcctgaagaacaggtcctcagagggccccagctccccttccgggaagctcatgagccccaagctgtatgtgtgggccaaagaccgccctgagatctgggagggagagcctccgtgtctcccaccgagggacagcctgaaccagagcctcagccaggacctcaccatggcccctggctccacactctggctgtcctgtggggtaccccctgactctgtgtccaggggccccctctcctggacccatgtgcaccccaaggggcctaagtcattgctgagcctagagctgaaggacgatcgcccggccagagatatgtgggtaatggagacgggtctgttgttgccccgggccacagctcaagacgctggaaagtattattgtcaccgtggcaacctgaccatgtcattccacctggagatcactgctcggccagggggaggtgggtctggaggtggaggatctggtggaggtgggtctggtggaggtgggtctgaggtgcagctggtggagtctggtggtggtcttgttcaacccggtggttctcttcgtctttcttgtgctgcttctggttttaatattaaagatacttatattcattgggttcgtcaagctcctggtaaaggtcttgaatgggttgctcgtatttatcctactaatggttatactcgttatgctgattctgttaaaggtcgttttactatttctgctgatacttctaaaaatactgcttatcttcaaatgaactctcttcgtgctgaagatactgctgtttattattgttctcgttggggtggtgatggtttttatgctatggattattggggtcaaggtactcttgtcaccgtctcctcagctagcaccgggggaggtgggtctggaggtggaggatctggtggaggtgggtctgacatccagatgacccagtctccttcttctctttctgcttctgttggtgatcgtgttactattacttgtcgtgcttctcaagatgttaatactgctgttgcttggtatcaacaaaaacccggtaaagctcctaaacttcttatttattctgcttcttttctttattctggtgttccttctcgtttttctggttctcgttctggtactgattttactcttactatttcttctcttcaacctgaagattttgctacttattattgtcaacaacattatactactcctcctacttttggtcaaggtaccaaggtggagatcaaacgtacgcatcatcaccatcaccat

SEQ ID NO: 274 - DNA, 2434 bp, Artificial Sequence
  Description of Artificial Sequence: Synthetic polynucleotide
gggagaagctagacttaaaatcttccattgcagctgtaaacacatctggacaatagtctgttttctgcatttgtgaatcccacacccatggaactatgaatcgtgcatcagagttatttaaaaccaccgtgcatggagtgaaccaataccgaggtgtttgcttatcattttcctttgagcacacagcacagccttgaactcagtgacactcctaagagggctctagggtcaggccaacttagatgagatgctagtctttagctaaagatgcccttccacccccgttgcacgaccttgcttctcagtctttgttgagtcttctgggggagaatccccctagaggactcagtttacaaaaccctaagtgagaccactgccaagaagtgcttgctcacccctcctgccgcggcagggaatccccctttccttgtacaggcaaaacacaaaaaaggactcataagtgaagcctgatccttctcaccaaacactgcccacacctcctagtaattgaacttgaaaaaaaaaactggtttgaaaaattaccgcaaaccatattgtcataaaaaaaaaaaaaaacacttcctatatgagatcacagaacagagtaggcacaagttcctgctgagcagatcagcctaatgcttaaatagaacaactcctggctgtcattgacattgtctaaaagccaagatgacagactgagaggcctgagcccttgttctggcattctcccaggaagatgcagtaaaggggttgacccaatatacgcggccgcgccaccatgccacctcctcgcctcctcttcttcctcctcttcctcacccccatggaagtcaggcccgaggaacctctagtggtgaaggtggaagagggagataacgctgtgctgcagtgcctcaaggggacctcagatggccccactcagcagctgacttggtctcgggagtccccgcttaaacccttcttaaaactcagcctggggctgccaggcctgggaatccacatgaggcccctggccatctggcttttcatcttcaacgtctctcaacagatggggggcttctacctgtgccagccggggcccccctctgagaaggcctggcagcctggctggacagtcaatgtggagggcagcggggagctgttccggtggaatgtttcggacctaggtggcctgggctgtggcctgaagaacaggtcctcagagggccccagctccccttccgggaagctcatgagccccaagctgtatgtgtgggccaaagaccgccctgagatctgggagggagagcctccgtgtctcccaccgagggacagcctgaaccagagcctcagccaggacctcaccatggcccctggctccacactctggctgtcctgtggggtaccccctgactctgtgtccaggggccccctctcctggacccatgtgcaccccaaggggcctaagtcattgctgagcctagagctgaaggacgatcgcccggccagagatatgtgggtaatggagacgggtctgttgttgccccgggccacagctcaagacgctggaaagtattattgtcaccgtggcaacctgaccatgtcattccacctggagatcactgctcggccagggggaggtgggtctggaggtggaggatctggtggaggtgggtctggtggaggtgggtctgaggtgcagctggtggagtctggtggtggtcttgttcaacccggtggttctcttcgtctttcttgtgctgcttctggttttaatattaaagatacttatattcattgggttcgtcaagctcctggtaaaggtcttgaatgggttgctcgtatttatcctactaatggttatactcgttatgctgattctgttaaaggtcgttttactatttctgctgatacttctaaaaatactgcttatcttcaaatgaactctcttcgtgctgaagatactgctgtttattattgttctcgttggggtggtgatggtttttatgctatggattattggggtcaaggtactcttgtcaccgtctcctcagctagcaccgggggaggtgggtctggaggtggaggatctggtggaggtgggtctgacatccagatgacccagtctccttcttctctttctgcttctgttggtgatcgtgttactattacttgtcgtgcttctcaagatgttaatactgctgttgcttggtatcaacaaaaacccggtaaagctcctaaacttcttatttattctgcttcttttctttattctggtgttccttctcgtttttctggttctcgttctggtactgattttactcttactatttcttctcttcaacctgaagattttgctacttattattgtcaacaacattatactactcctcctacttttggtcaaggtaccaaggtggagatcaaacgtacgcatcatcaccatcaccat

SEQ ID NO: 275 - DNA, 1998 bp, Artificial Sequence
  Description of Artificial Sequence: Synthetic polynucleotide
aatttaaggcaggatgtctcagagtctgggaaaatcccactttcctcctgctacaccttacagttgtgagaaagcacatttcagacaacagggaaaacccatacttcaccacaacaacacactatacattgtctggtccactggagcataaattaaagagaaacaatgtagtcaagcaagtaggcggcaagaggaagggggcggagacatcatcagggagtataaactctgagatgcctcagagcctcacagactcaacaagagctccagcaaagactttcactgtagcttgacttgacctgagattaactagggaatcttgagaataaaggcggccgcgccaccatgccacctcctcgcctcctcttcttcctcctcttcctcacccccatggaagtcaggcccgaggaacctctagtggtgaaggtggaagagggagataacgctgtgctgcagtgcctcaaggggacctcagatggccccactcagcagctgacttggtctcgggagtccccgcttaaacccttcttaaaactcagcctggggctgccaggcctgggaatccacatgaggcccctggccatctggcttttcatcttcaacgtctctcaacagatggggggcttctacctgtgccagccggggcccccctctgagaaggcctggcagcctggctggacagtcaatgtggagggcagcggggagctgttccggtggaatgtttcggacctaggtggcctgggctgtggcctgaagaacaggtcctcagagggccccagctccccttccgggaagctcatgagccccaagctgtatgtgtgggccaaagaccgccctgagatctgggagggagagcctccgtgtctcccaccgagggacagcctgaaccagagcctcagccaggacctcaccatggcccctggctccacactctggctgtcctgtggggtaccccctgactctgtgtccaggggccccctctcctggacccatgtgcaccccaaggggcctaagtcattgctgagcctagagctgaaggacgatcgcccggccagagatatgtgggtaatggagacgggtctgttgttgccccgggccacagctcaagacgctggaaagtattattgtcaccgtggcaacctgaccatgtcattccacctggagatcactgctcggccagggggaggtgggtctggaggtggaggatctggtggaggtgggtctggtggaggtgggtctgaggtgcagctggtggagtctggtggtggtcttgttcaacccggtggttctcttcgtctttcttgtgctgcttctggttttaatattaaagatacttatattcattgggttcgtcaagctcctggtaaaggtcttgaatgggttgctcgtatttatcctactaatggttatactcgttatgctgattctgttaaaggtcgttttactatttctgctgatacttctaaaaatactgcttatcttcaaatgaactctcttcgtgctgaagatactgctgtttattattgttctcgttggggtggtgatggtttttatgctatggattattggggtcaaggtactcttgtcaccgtctcctcagctagcaccgggggaggtgggtctggaggtggaggatctggtggaggtgggtctgacatccagatgacccagtctccttcttctctttctgcttctgttggtgatcgtgttactattacttgtcgtgcttctcaagatgttaatactgctgttgcttggtatcaacaaaaacccggtaaagctcctaaacttcttatttattctgcttcttttctttattctggtgttccttctcgtttttctggttctcgttctggtactgattttactcttactatttcttctcttcaacctgaagattttgctacttattattgtcaacaacattatactactcctcctacttttggtcaaggtaccaaggtggagatcaaacgtacgcatcatcaccatcaccat

SEQ ID NO: 276 - DNA, 2705 bp, Artificial Sequence
  Description of Artificial Sequence: Synthetic polynucleotide
taacgaagacagggccatgtagagggccccagggagtgaaagggcctccaggacctccaggtatggaatacaggggacgtttaagaagatatggccacacactggggccctgagaagtgagagcttcatgaaaaaaatcagggaccccagagttccttggaagccaagactgaaaccagcattatgagtctccgggtcagaatgaaagaagaaggcctgccccagtggggtctgtgaattcccgggggtgatttcactccccggggctgtcccaggcttgtccctgctacccccacccagcctttcctgaggcctcaagcctgccaccaagcccccagctccttctccccgcagggacccaaacacaggcctcgggactcaacacagcttttccctccaaccccgttttctctccctcaaggactcagctttctgaggcccctcccagttctagttctatctttttcctgcatcctgtctggaagttagaaggaaacagaccacagacccggtccccaaaagaaatggaggcaataggttttgaggggcatggggacggggttcagcctccagggtcctacacacaaatcagtcagtggcccagaagaccccctcggaatcggagcagggaggatggggagtgtgaggggtatccttgatgcttgtgtgtccccaactttccaaatccccgcccccgcgatggagaagaaaccgagacagaaggtgcagggcccactaccgcttcctccagatgagctcatgggtttctccaccaaggaagttttccgctggttgaatgattctttccccgccctcctctcgccccagggacatataaaggcagttgttggcacacccagccagcagacgctccctcagcaaggacagcagaggaccagctaagagggagagaagcaactacagaccccccctgaaaacaaccctcagacgccacatcccctgacaagctgccaggcaggttctcttcctctcacatactgacccacggctccaccctctctcccctggaaaggacacgcggccgcgccaccatgccacctcctcgcctcctcttcttcctcctcttcctcacccccatggaagtcaggcccgaggaacctctagtggtgaaggtggaagagggagataacgctgtgctgcagtgcctcaaggggacctcagatggccccactcagcagctgacttggtctcgggagtccccgcttaaacccttcttaaaactcagcctggggctgccaggcctgggaatccacatgaggcccctggccatctggcttttcatcttcaacgtctctcaacagatggggggcttctacctgtgccagccggggcccccctctgagaaggcctggcagcctggctggacagtcaatgtggagggcagcggggagctgttccggtggaatgtttcggacctaggtggcctgggctgtggcctgaagaacaggtcctcagagggccccagctccccttccgggaagctcatgagccccaagctgtatgtgtgggccaaagaccgccctgagatctgggagggagagcctccgtgtctcccaccgagggacagcctgaaccagagcctcagccaggacctcaccatggcccctggctccacactctggctgtcctgtggggtaccccctgactctgtgtccaggggccccctctcctggacccatgtgcaccccaaggggcctaagtcattgctgagcctagagctgaaggacgatcgcccggccagagatatgtgggtaatggagacgggtctgttgttgccccgggccacagctcaagacgctggaaagtattattgtcaccgtggcaacctgaccatgtcattccacctggagatcactgctcggccagggggaggtgggtctggaggtggaggatctggtggaggtgggtctggtggaggtgggtctgaggtgcagctggtggagtctggtggtggtcttgttcaacccggtggttctcttcgtctttcttgtgctgcttctggttttaatattaaagatacttatattcattgggttcgtcaagctcctggtaaaggtcttgaatgggttgctcgtatttatcctactaatggttatactcgttatgctgattctgttaaaggtcgttttactatttctgctgatacttctaaaaatactgcttatcttcaaatgaactctcttcgtgctgaagatactgctgtttattattgttctcgttggggtggtgatggtttttatgctatggattattggggtcaaggtactcttgtcaccgtctcctcagctagcaccgggggaggtgggtctggaggtggaggatctggtggaggtgggtctgacatccagatgacccagtctccttcttctctttctgcttctgttggtgatcgtgttactattacttgtcgtgcttctcaagatgttaatactgctgttgcttggtatcaacaaaaacccggtaaagctcctaaacttcttatttattctgcttcttttctttattctggtgttccttctcgtttttctggttctcgttctggtactgattttactcttactatttcttctcttcaacctgaagattttgctacttattattgtcaacaacattatactactcctcctacttttggtcaaggtaccaaggtggagatcaaacgtacgcatcatcaccatcaccat

SEQ ID NO: 277 - DNA, 2030 bp, Artificial Sequence
  Description of Artificial Sequence: Synthetic polynucleotide
gatatcgaattaggaggaaaactgtttcatacagaaggcgtcaattaggaggaaaaactgtttcatacagaaggcgtcaattaggaggaaaaactgtttcatacagaaggcgtcaattggtcccatcgaattaggaggaaaaactgtttcatacagaaggcgtcaattaggaggaaaaactgtttcatacagaaggcgtcaattaggaggaaaaactgtttcatacagaaggcgtcaattggtcccgggacattttgacacccccataatatttttccagaattaacagtataaattgcatctcttgttcaagagttccctatcactctctttaatcactactcacagtaacctcaactcctggcggccgcgccaccatgccacctcctcgcctcctcttcttcctcctcttcctcacccccatggaagtcaggcccgaggaacctctagtggtgaaggtggaagagggagataacgctgtgctgcagtgcctcaaggggacctcagatggccccactcagcagctgacttggtctcgggagtccccgcttaaacccttcttaaaactcagcctggggctgccaggcctgggaatccacatgaggcccctggccatctggcttttcatcttcaacgtctctcaacagatggggggcttctacctgtgccagccggggcccccctctgagaaggcctggcagcctggctggacagtcaatgtggagggcagcggggagctgttccggtggaatgtttcggacctaggtggcctgggctgtggcctgaagaacaggtcctcagagggccccagctccccttccgggaagctcatgagccccaagctgtatgtgtgggccaaagaccgccctgagatctgggagggagagcctccgtgtctcccaccgagggacagcctgaaccagagcctcagccaggacctcaccatggcccctggctccacactctggctgtcctgtggggtaccccctgactctgtgtccaggggccccctctcctggacccatgtgcaccccaaggggcctaagtcattgctgagcctagagctgaaggacgatcgcccggccagagatatgtgggtaatggagacgggtctgttgttgccccgggccacagctcaagacgctggaaagtattattgtcaccgtggcaacctgaccatgtcattccacctggagatcactgctcggccagggggaggtgggtctggaggtggaggatctggtggaggtgggtctggtggaggtgggtctgaggtgcagctggtggagtctggtggtggtcttgttcaacccggtggttctcttcgtctttcttgtgctgcttctggttttaatattaaagatacttatattcattgggttcgtcaagctcctggtaaaggtcttgaatgggttgctcgtatttatcctactaatggttatactcgttatgctgattctgttaaaggtcgttttactatttctgctgatacttctaaaaatactgcttatcttcaaatgaactctcttcgtgctgaagatactgctgtttattattgttctcgttggggtggtgatggtttttatgctatggattattggggtcaaggtactcttgtcaccgtctcctcagctagcaccgggggaggtgggtctggaggtggaggatctggtggaggtgggtctgacatccagatgacccagtctccttcttctctttctgcttctgttggtgatcgtgttactattacttgtcgtgcttctcaagatgttaatactgctgttgcttggtatcaacaaaaacccggtaaagctcctaaacttcttatttattctgcttcttttctttattctggtgttccttctcgtttttctggttctcgttctggtactgattttactcttactatttcttctcttcaacctgaagattttgctacttattattgtcaacaacattatactactcctcctacttttggtcaaggtaccaaggtggagatcaaacgtacgcatcatcaccatcaccat

SEQ ID NO: 278 - DNA, 1515 bp, Artificial Sequence
  Description of Artificial Sequence: Synthetic polynucleotide
atggattttcaggtgcagattttcagcttcctgctaatcagtgcctcagtcataatgtctagaatggcccaggtcaaactacaggagtcaggggctgagctggtgaagcctggggcctcagtgaagatgtcctgcaaggcttctggctacacatttaccagttacaatatgcactgggtaaagcagacacctggacagggcctggaatggattggagctatttatccaggaaatggtgatacttcctacaatcagaagttcaaaggcaaggccacattgactgcagacaaatcctccagcacagcctacatgcagctcagcagcctgacatctgaggactctgcggactattactgtgcaagatctaattattacggtagtagctactggttcttcgatgtctggggccaagggaccacggtcaccgtctcctcaggtggaggcggttcaggcggaggtggctctggcggtggcggatcggacatcgagctcactcagtctccaacaatcctgtctgcatctccaggggagaaggtcacaatgacttgcagggccagctcaagtgtaaattacatggactggtaccagaagaagccaggatcctcccccaaaccctggatttatgccacatccaacctggcttctggagtccctgctcgcttcagtggcagtgggtctgggacctcttactctctcacaatcagcagagtggaggctgaagatgctgccacttattactgccagcagtggagttttaatccacccacgttcggaggggggacaaagttggaaataaaacgggccgccgctggtgatcccgccgagcccaaatctcctgacaaaactcacacatgcccaccgtgcccagcacctgaactcctggggggaccgtcagtcttcctcttccccccaaaacccaaggacaccctcatgatctcccggacccctgaggtcacatgcgtggtggtggacgtgagccacgaagaccctgaggtcaagttcaactggtacgtggacggcgtggaggtgcataatgccaagacaaagccgcgggaggagcagtacaacagcacgtaccgtgtggtcagcgtcctcaccgtcctgcaccaggactggctgaatggcaaggagtacaagtgcaaggtctccaacaaagccctcccagcccccatcgagaaaaccatctccaaagccaaagggcagccccgagaaccacaggtgtacaccctgcccccatcccgggaggagatgaccaagaaccaggtcagcctgacctgcctggtcaaaggcttctatcccagcgacatcgccgtggagtgggagagcaatgggcagccggagaacaactacaagaccacgcctcccgtgctggactccgacggctccttcttcctctacagcaagctcaccgtggacaagagcaggtggcagcaggggaacgtcttctcatgctccgtgatgcacgaggctctgcacaaccactacacgcagaagagcctctccctgtctccgggt

SEQ ID NO: 279 - DNA, 828 bp, Artificial Sequence
  Description of Artificial Sequence: Synthetic polynucleotide
atggattttcaggtgcagattttcagcttcctgctaatcagtgcctcagtcataatgtctagaatggcccaggtcaaactacaggagtcaggggctgagctggtgaagcctggggcctcagtgaagatgtcctgcaaggcttctggctacacatttaccagttacaatatgcactgggtaaagcagacacctggacagggcctggaatggattggagctatttatccaggaaatggtgatacttcctacaatcagaagttcaaaggcaaggccacattgactgcagacaaatcctccagcacagcctacatgcagctcagcagcctgacatctgaggactctgcggactattactgtgcaagatctaattattacggtagtagctactggttcttcgatgtctggggccaagggaccacggtcaccgtctcctcaggtggaggcggttcaggcggaggtggctctggcggtggcggatcggacatcgagctcactcagtctccaacaatcctgtctgcatctccaggggagaaggtcacaatgacttgcagggccagctcaagtgtaaattacatggactggtaccagaagaagccaggatcctcccccaaaccctggatttatgccacatccaacctggcttctggagtccctgctcgcttcagtggcagtgggtctgggacctcttactctctcacaatcagcagagtggaggctgaagatgctgccacttattactgccagcagtggagttttaatccacccacgttcggaggggggacaaagttggaaataaaacgggccgccgctcatcatcaccatcaccat

SEQ ID NO: 280 - DNA, 1515 bp, Artificial Sequence
  Description of Artificial Sequence: Synthetic polynucleotide
atggattttcaggtgcagattttcagcttcctgctaatcagtgcctcagtcataatgtctagagacatcgagctcactcagtctccaacaatcctgtctgcatctccaggggagaaggtcacaatgacttgcagggccagctcaagtgtaaattacatggactggtaccagaagaagccaggatcctcccccaaaccctggatttatgccacatccaacctggcttctggagtccctgctcgcttcagtggcagtgggtctgggacctcttactctctcacaatcagcagagtggaggctgaagatgctgccacttattactgccagcagtggagttttaatccacccacgttcggaggggggacaaagttggaaataaaacggggtggaggcggttcaggcggaggtggctctggcggtggcggatcgatggcccaggtcaaactacaggagtcaggggctgagctggtgaagcctggggcctcagtgaagatgtcctgcaaggcttctggctacacatttaccagttacaatatgcactgggtaaagcagacacctggacagggcctggaatggattggagctatttatccaggaaatggtgatacttcctacaatcagaagttcaaaggcaaggccacattgactgcagacaaatcctccagcacagcctacatgcagctcagcagcctgacatctgaggactctgcggactattactgtgcaagatctaattattacggtagtagctactggttcttcgatgtctggggccaagggaccacggtcaccgtctcctcagccgccgctggtgatcccgccgagcccaaatctcctgacaaaactcacacatgcccaccgtgcccagcacctgaactcctggggggaccgtcagtcttcctcttccccccaaaacccaaggacaccctcatgatctcccggacccctgaggtcacatgcgtggtggtggacgtgagccacgaagaccctgaggtcaagttcaactggtacgtggacggcgtggaggtgcataatgccaagacaaagccgcgggaggagcagtacaacagcacgtaccgtgtggtcagcgtcctcaccgtcctgcaccaggactggctgaatggcaaggagtacaagtgcaaggtctccaacaaagccctcccagcccccatcgagaaaaccatctccaaagccaaagggcagccccgagaaccacaggtgtacaccctgcccccatcccgggaggagatgaccaagaaccaggtcagcctgacctgcctggtcaaaggcttctatcccagcgacatcgccgtggagtgggagagcaatgggcagccggagaacaactacaagaccacgcctcccgtgctggactccgacggctccttcttcctctacagcaagctcaccgtggacaagagcaggtggcagcaggggaacgtcttctcatgctccgtgatgcacgaggctctgcacaaccactacacgcagaagagcctctccctgtctccgggt

SEQ ID NO: 281 - DNA, 828 bp, Artificial Sequence
  Description of Artificial Sequence: Synthetic polynucleotide
atggattttcaggtgcagattttcagcttcctgctaatcagtgcctcagtcataatgtctagagacatcgagctcactcagtctccaacaatcctgtctgcatctccaggggagaaggtcacaatgacttgcagggccagctcaagtgtaaattacatggactggtaccagaagaagccaggatcctcccccaaaccctggatttatgccacatccaacctggcttctggagtccctgctcgcttcagtggcagtgggtctgggacctcttactctctcacaatcagcagagtggaggctgaagatgctgccacttattactgccagcagtggagttttaatccacccacgttcggaggggggacaaagttggaaataaaacggggtggaggcggttcaggcggaggtggctctggcggtggcggatcgatggcccaggtcaaactacaggagtcaggggctgagctggtgaagcctggggcctcagtgaagatgtcctgcaaggcttctggctacacatttaccagttacaatatgcactgggtaaagcagacacctggacagggcctggaatggattggagctatttatccaggaaatggtgatacttcctacaatcagaagttcaaaggcaaggccacattgactgcagacaaatcctccagcacagcctacatgcagctcagcagcctgacatctgaggactctgcggactattactgtgcaagatctaattattacggtagtagctactggttcttcgatgtctggggccaagggaccacggtcaccgtctcctcagccgccgctcatcatcaccatcaccat

SEQ ID NO: 282 - DNA, 2346 bp, Artificial Sequence
  Description of Artificial Sequence: Synthetic polynucleotide
atgccacctcctcgcctcctcttcttcctcctcttcctcacccccatggaagtcaggcccgaggaacctctagtggtgaaggtggaagagggagataacgctgtgctgcagtgcctcaaggggacctcagatggccccactcagcagctgacctggtctcgggagtccccgcttaaacccttcttaaaactcagcctggggctgccaggcctgggaatccacatgaggcccctggccatctggcttttcatcttcaacgtctctcaacagatggggggcttctacctgtgccagccggggcccccctctgagaaggcctggcagcctggctggacagtcaatgtggagggcagcggggagctgttccggtggaatgtttcggacctaggtggcctgggctgtggcctgaagaacaggtcctcagagggccccagctccccttccgggaagctcatgagccccaagctgtatgtgtgggccaaagaccgccctgagatctgggagggagagcctccgtgtctcccaccgagggacagcctgaaccagagcctcagccaggacctcaccatggcccctggctccacactctggctgtcctgtggggtaccccctgactctgtgtccaggggccccctctcctggacccatgtgcaccccaaggggcctaagtcattgctgagcctagagctgaaggacgatcgcccggccagagatatgtgggtaatggagacgggtctgttgttgccccgggccacagctcaagacgctggaaagtattattgtcaccgtggcaacctgaccatgtcattccacctggagatcactgctcggccaggaggaggtgggtctggaggtggaggatctggtggaggtgggtctggaggaggtgggtctatggcccaggtcaaactacaggagtcaggggctgagctggtgaagcctggggcctcagtgaagatgtcctgcaaggcttctggctacacatttaccagttacaatatgcactgggtaaagcagacacctggacagggcctggaatggattggagctatttatccaggaaatggtgatacttcctacaatcagaagttcaaaggcaaggccacattgactgcagacaaatcctccagcacagcctacatgcagctcagcagcctgacatctgaggactctgcggactattactgtgcaagatctaattattacggtagtagctactggttcttcgatgtctggggccaagggaccacggtcaccgtctcctcaggtggaggcggttcaggcggaggtggctctggcggtggcggatcggacatcgagctcactcagtctccaacaatcctgtctgcatctccaggggagaaggtcacaatgacttgcagggccagctcaagtgtaaattacatggactggtaccagaagaagccaggatcctcccccaaaccctggatttatgccacatccaacctggcttctggagtccctgctcgcttcagtggcagtgggtctgggacctcttactctctcacaatcagcagagtggaggctgaagatgctgccacttattactgccagcagtggagttttaatccacccacgttcggaggggggacaaagttggaaataaaacgggccgccgctggtgatcccgccgagcccaaatctcctgacaaaactcacacatgcccaccgtgcccagcacctgaactcctggggggaccgtcagtcttcctcttccccccaaaacccaaggacaccctcatgatctcccggacccctgaggtcacatgcgtggtggtggacgtgagccacgaagaccctgaggtcaagttcaactggtacgtggacggcgtggaggtgcataatgccaagacaaagccgcgggaggagcagtacaacagcacgtaccgtgtggtcagcgtcctcaccgtcctgcaccaggactggctgaatggcaaggagtacaagtgcaaggtctccaacaaagccctcccagcccccatcgagaaaaccatctccaaagccaaagggcagccccgagaaccacaggtgtacaccctgcccccatcccgggaggagatgaccaagaaccaggtcagcctgacctgcctggtcaaaggcttctatcccagcgacatcgccgtggagtgggagagcaatgggcagccggagaacaactacaagaccacgcctcccgtgctggactccgacggctccttcttcctctacagcaagctcaccgtggacaagagcaggtggcagcaggggaacgtcttctcatgctccgtgatgcacgaggctctgcacaaccactacacgcagaagagcctctccctgtctccgggt

SEQ ID NO: 283 - DNA, 1659 bp, Artificial Sequence
  Description of Artificial Sequence: Synthetic polynucleotide
atgccacctcctcgcctcctcttcttcctcctcttcctcacccccatggaagtcaggcccgaggaacctctagtggtgaaggtggaagagggagataacgctgtgctgcagtgcctcaaggggacctcagatggccccactcagcagctgacctggtctcgggagtccccgcttaaacccttcttaaaactcagcctggggctgccaggcctgggaatccacatgaggcccctggccatctggcttttcatcttcaacgtctctcaacagatggggggcttctacctgtgccagccggggcccccctctgagaaggcctggcagcctggctggacagtcaatgtggagggcagcggggagctgttccggtggaatgtttcggacctaggtggcctgggctgtggcctgaagaacaggtcctcagagggccccagctccccttccgggaagctcatgagccccaagctgtatgtgtgggccaaagaccgccctgagatctgggagggagagcctccgtgtctcccaccgagggacagcctgaaccagagcctcagccaggacctcaccatggcccctggctccacactctggctgtcctgtggggtaccccctgactctgtgtccaggggccccctctcctggacccatgtgcaccccaaggggcctaagtcattgctgagcctagagctgaaggacgatcgcccggccagagatatgtgggtaatggagacgggtctgttgttgccccgggccacagctcaagacgctggaaagtattattgtcaccgtggcaacctgaccatgtcattccacctggagatcactgctcggccaggaggaggtgggtctggaggtggaggatctggtggaggtgggtctggaggaggtgggtctatggcccaggtcaaactacaggagtcaggggctgagctggtgaagcctggggcctcagtgaagatgtcctgcaaggcttctggctacacatttaccagttacaatatgcactgggtaaagcagacacctggacagggcctggaatggattggagctatttatccaggaaatggtgatacttcctacaatcagaagttcaaaggcaaggccacattgactgcagacaaatcctccagcacagcctacatgcagctcagcagcctgacatctgaggactctgcggactattactgtgcaagatctaattattacggtagtagctactggttcttcgatgtctggggccaagggaccacggtcaccgtctcctcaggtggaggcggttcaggcggaggtggctctggcggtggcggatcggacatcgagctcactcagtctccaacaatcctgtctgcatctccaggggagaaggtcacaatgacttgcagggccagctcaagtgtaaattacatggactggtaccagaagaagccaggatcctcccccaaaccctggatttatgccacatccaacctggcttctggagtccctgctcgcttcagtggcagtgggtctgggacctcttactctctcacaatcagcagagtggaggctgaagatgctgccacttattactgccagcagtggagttttaatccacccacgttcggaggggggacaaagttggaaataaaacgggccgccgctcatcatcaccatcaccat

SEQ ID NO: 284 - DNA, 2346 bp, Artificial Sequence
  Description of Artificial Sequence: Synthetic polynucleotide
atgccacctcctcgcctcctcttcttcctcctcttcctcacccccatggaagtcaggcccgaggaacctctagtggtgaaggtggaagagggagataacgctgtgctgcagtgcctcaaggggacctcagatggccccactcagcagctgacctggtctcgggagtccccgcttaaacccttcttaaaactcagcctggggctgccaggcctgggaatccacatgaggcccctggccatctggcttttcatcttcaacgtctctcaacagatggggggcttctacctgtgccagccggggcccccctctgagaaggcctggcagcctggctggacagtcaatgtggagggcagcggggagctgttccggtggaatgtttcggacctaggtggcctgggctgtggcctgaagaacaggtcctcagagggccccagctccccttccgggaagctcatgagccccaagctgtatgtgtgggccaaagaccgccctgagatctgggagggagagcctccgtgtctcccaccgagggacagcctgaaccagagcctcagccaggacctcaccatggcccctggctccacactctggctgtcctgtggggtaccccctgactctgtgtccaggggccccctctcctggacccatgtgcaccccaaggggcctaagtcattgctgagcctagagctgaaggacgatcgcccggccagagatatgtgggtaatggagacgggtctgttgttgccccgggccacagctcaagacgctggaaagtattattgtcaccgtggcaacctgaccatgtcattccacctggagatcactgctcggccaggaggaggtgggtctggaggtggaggatctggtggaggtgggtctggaggaggtgggtctgacatcgagctcactcagtctccaacaatcctgtctgcatctccaggggagaaggtcacaatgacttgcagggccagctcaagtgtaaattacatggactggtaccagaagaagccaggatcctcccccaaaccctggatttatgccacatccaacctggcttctggagtccctgctcgcttcagtggcagtgggtctgggacctcttactctctcacaatcagcagagtggaggctgaagatgctgccacttattactgccagcagtggagttttaatccacccacgttcggaggggggacaaagttggaaataaaacggggtggaggcggttcaggcggaggtggctctggcggtggcggatcgatggcccaggtcaaactacaggagtcaggggctgagctggtgaagcctggggcctcagtgaagatgtcctgcaaggcttctggctacacatttaccagttacaatatgcactgggtaaagcagacacctggacagggcctggaatggattggagctatttatccaggaaatggtgatacttcctacaatcagaagttcaaaggcaaggccacattgactgcagacaaatcctccagcacagcctacatgcagctcagcagcctgacatctgaggactctgcggactattactgtgcaagatctaattattacggtagtagctactggttcttcgatgtctggggccaagggaccacggtcaccgtctcctcagccgccgctggtgatcccgccgagcccaaatctcctgacaaaactcacacatgcccaccgtgcccagcacctgaactcctggggggaccgtcagtcttcctcttccccccaaaacccaaggacaccctcatgatctcccggacccctgaggtcacatgcgtggtggtggacgtgagccacgaagaccctgaggtcaagttcaactggtacgtggacggcgtggaggtgcataatgccaagacaaagccgcgggaggagcagtacaacagcacgtaccgtgtggtcagcgtcctcaccgtcctgcaccaggactggctgaatggcaaggagtacaagtgcaaggtctccaacaaagccctcccagcccccatcgagaaaaccatctccaaagccaaagggcagccccgagaaccacaggtgtacaccctgcccccatcccgggaggagatgaccaagaaccaggtcagcctgacctgcctggtcaaaggcttctatcccagcgacatcgccgtggagtgggagagcaatgggcagccggagaacaactacaagaccacgcctcccgtgctggactccgacggctccttcttcctctacagcaagctcaccgtggacaagagcaggtggcagcaggggaacgtcttctcatgctccgtgatgcacgaggctctgcacaaccactacacgcagaagagcctctccctgtctccgggt

SEQ ID NO: 285 - DNA, 1659 bp, Artificial Sequence
  Description of Artificial Sequence: Synthetic polynucleotide
atgccacctcctcgcctcctcttcttcctcctcttcctcacccccatggaagtcaggcccgaggaacctctagtggtgaaggtggaagagggagataacgctgtgctgcagtgcctcaaggggacctcagatggccccactcagcagctgacctggtctcgggagtccccgcttaaacccttcttaaaactcagcctggggctgccaggcctgggaatccacatgaggcccctggccatctggcttttcatcttcaacgtctctcaacagatggggggcttctacctgtgccagccggggcccccctctgagaaggcctggcagcctggctggacagtcaatgtggagggcagcggggagctgttccggtggaatgtttcggacctaggtggcctgggctgtggcctgaagaacaggtcctcagagggccccagctccccttccgggaagctcatgagccccaagctgtatgtgtgggccaaagaccgccctgagatctgggagggagagcctccgtgtctcccaccgagggacagcctgaaccagagcctcagccaggacctcaccatggcccctggctccacactctggctgtcctgtggggtaccccctgactctgtgtccaggggccccctctcctggacccatgtgcaccccaaggggcctaagtcattgctgagcctagagctgaaggacgatcgcccggccagagatatgtgggtaatggagacgggtctgttgttgccccgggccacagctcaagacgctggaaagtattattgtcaccgtggcaacctgaccatgtcattccacctggagatcactgctcggccaggaggaggtgggtctggaggtggaggatctggtggaggtgggtctggaggaggtgggtctgacatcgagctcactcagtctccaacaatcctgtctgcatctccaggggagaaggtcacaatgacttgcagggccagctcaagtgtaaattacatggactggtaccagaagaagccaggatcctcccccaaaccctggatttatgccacatccaacctggcttctggagtccctgctcgcttcagtggcagtgggtctgggacctcttactctctcacaatcagcagagtggaggctgaagatgctgccacttattactgccagcagtggagttttaatccacccacgttcggaggggggacaaagttggaaataaaacggggtggaggcggttcaggcggaggtggctctggcggtggcggatcgatggcccaggtcaaactacaggagtcaggggctgagctggtgaagcctggggcctcagtgaagatgtcctgcaaggcttctggctacacatttaccagttacaatatgcactgggtaaagcagacacctggacagggcctggaatggattggagctatttatccaggaaatggtgatacttcctacaatcagaagttcaaaggcaaggccacattgactgcagacaaatcctccagcacagcctacatgcagctcagcagcctgacatctgaggactctgcggactattactgtgcaagatctaattattacggtagtagctactggttcttcgatgtctggggccaagggaccacggtcaccgtctcctcagccgccgctcatcatcaccatcaccat

SEQ ID NO: 286 - DNA, 1671 bp, Artificial Sequence
  Description of Artificial Sequence: Synthetic polynucleotide
atgccacctcctcgcctcctcttcttcctcctcttcctcacccccatggaagtcaggcccgaggaacctctagtggtgaaggtggaagagggagataacgctgtgctgcagtgcctcaaggggacctcagatggccccactcagcagctgacctggtctcgggagtccccgcttaaacccttcttaaaactcagcctggggctgccaggcctgggaatccacatgaggcccctggccatctggcttttcatcttcaacgtctctcaacagatggggggcttctacctgtgccagccggggcccccctctgagaaggcctggcagcctggctggacagtcaatgtggagggcagcggggagctgttccggtggaatgtttcggacctaggtggcctgggctgtggcctgaagaacaggtcctcagagggccccagctccccttccgggaagctcatgagccccaagctgtatgtgtgggccaaagaccgccctgagatctgggagggagagcctccgtgtctcccaccgagggacagcctgaaccagagcctcagccaggacctcaccatggcccctggctccacactctggctgtcctgtggggtaccccctgactctgtgtccaggggccccctctcctggacccatgtgcaccccaaggggcctaagtcattgctgagcctagagctgaaggacgatcgcccggccagagatatgtgggtaatggagacgggtctgttgttgccccgggccacagctcaagacgctggaaagtattattgtcaccgtggcaacctgaccatgtcattccacctggagatcactgctcggccaggaggaggtgggtctggaggtggaggatctggtggaggtgggtctggaggaggtgggtctcaggtgcagctggtgcagagcggcgccgaggacaagaagcccggcgagagcgtgaagatcagctgcaaggccagcggctacaccttcaccaactacggcatgaactgggtgaggcaggcccccggccagggcctgaagtggatgggctggatcaacacctacaccggcgagagcacctacgccgacgacttcaagggcaggttcgccttcagcctggacaccagcgccagcaccgcctacctgcagctgagcagcctgaggggcgaggacaccgccgtgtacttctgcgccaggttcgccatcaagggcgactactggggccagggcaccaccgtgaccgtgagcagcgccagcaccggcggcggcggcagcggcggcggcggcagcggcggcggcggcagcggcggcggcggcagcgacatcgtgatgacccagagccccctgagcctggaggtgagccccggcgagcccgccagcatcagctgcaggagcaccaagagcctgctgcacagcgacggcatcacctacctgtactggtacctgcagaagcccggccagagcccccagctgctgatctaccagctgagcaacctggccagcggcgtgcccgacaggttcagcagcagcggcagcggcaccgacttcaccctgaagatcagcagggtggaggccgaggacgagggcacctactactgcgcccagaacctggagatccccaggaccttcggccagggcaccaagctggagatcaagaggacccatcatcaccatcaccat

SEQ ID NO: 287 - DNA, 1656 bp, Artificial Sequence
  Description of Artificial Sequence: Synthetic polynucleotide
atgccacctcctcgcctcctcttcttcctcctcttcctcacccccatggaagtcaggcccgaggaacctctagtggtgaaggtggaagagggagataacgctgtgctgcagtgcctcaaggggacctcagatggccccactcagcagctgacctggtctcgggagtccccgcttaaacccttcttaaaactcagcctggggctgccaggcctgggaatccacatgaggcccctggccatctggcttttcatcttcaacgtctctcaacagatggggggcttctacctgtgccagccggggcccccctctgagaaggcctggcagcctggctggacagtcaatgtggagggcagcggggagctgttccggtggaatgtttcggacctaggtggcctgggctgtggcctgaagaacaggtcctcagagggccccagctccccttccgggaagctcatgagccccaagctgtatgtgtgggccaaagaccgccctgagatctgggagggagagcctccgtgtctcccaccgagggacagcctgaaccagagcctcagccaggacctcaccatggcccctggctccacactctggctgtcctgtggggtaccccctgactctgtgtccaggggccccctctcctggacccatgtgcaccccaaggggcctaagtcattgctgagcctagagctgaaggacgatcgcccggccagagatatgtgggtaatggagacgggtctgttgttgccccgggccacagctcaagacgctggaaagtattattgtcaccgtggcaacctgaccatgtcattccacctggagatcactgctcggccaggaggaggtgggtctggaggtggaggatctggtggaggtgggtctggaggaggtgggtctcaggttcagctggtgcagtctggtgctgaggatgtgaagcctgatgcctcagtgaagctctcctgcaaggcttctggttacacattcactgactactacatgcactgggtgcgtcaggcccctggtcaaggtcttgagtggatgggtcgtgttaatcctaaccggaggggtactacctacaaccagaaattcgagggccgtgtcaccatgaccacagacacatccacgagcacagcctacatgcagctgagtagcctgcgtggtgaagacacggccgtgtattactgtgcgcgtgcgaactggcttgactactggggccagggcaccaccgtcaccgtctcctccgcctccaccgggggaggtgggtctggaggtggaggatctggtggaggtgggtctggtggaggtgggtctgacatccagatgacccagtctccatcctccctggaggcatctgtaggagacagagtcaccatcacttgcagtgtcagctcaagtgtatcctccatttacttgcactggtatcagcagaaaccagggaaaagccctaagctcctgatctatagcacatccaacttggcttctggagtcccagataggttcagtggcagtggatctgggacagatttcactctcaccatcagcagtctgcaagccgaagatgagggcacttactactgtcaagtctacagtggttacccgctcacgttcggcggagggaccaagctggagatcaaacgaactcatcatcaccatcaccat

SEQ ID NO: 288 - DNA, 1665 bp, Artificial Sequence
  Description of Artificial Sequence: Synthetic polynucleotide
atgccacctcctcgcctcctcttcttcctcctcttcctcacccccatggaagtcaggcccgaggaacctctagtggtgaaggtggaagagggagataacgctgtgctgcagtgcctcaaggggacctcagatggccccactcagcagctgacctggtctcgggagtccccgcttaaacccttcttaaaactcagcctggggctgccaggcctgggaatccacatgaggcccctggccatctggcttttcatcttcaacgtctctcaacagatggggggcttctacctgtgccagccggggcccccctctgagaaggcctggcagcctggctggacagtcaatgtggagggcagcggggagctgttccggtggaatgtttcggacctaggtggcctgggctgtggcctgaagaacaggtcctcagagggccccagctccccttccgggaagctcatgagccccaagctgtatgtgtgggccaaagaccgccctgagatctgggagggagagcctccgtgtctcccaccgagggacagcctgaaccagagcctcagccaggacctcaccatggcccctggctccacactctggctgtcctgtggggtaccccctgactctgtgtccaggggccccctctcctggacccatgtgcaccccaaggggcctaagtcattgctgagcctagagctgaaggacgatcgcccggccagagatatgtgggtaatggagacgggtctgttgttgccccgggccacagctcaagacgctggaaagtattattgtcaccgtggcaacctgaccatgtcattccacctggagatcactgctcggccaggaggaggtgggtctggaggtggaggatctggtggaggtgggtctggaggaggtgggtctcaggtgcagctgcaggagagcggccccggcgacgtgaagcccagcgagaccctgagcctgacctgcaccgtgagcggcggcagcgtgagcagcggcgactactactggacctggatcaggcagagccccggcaagggcctggagtggatcggccacatctactacagcggcaacaccaactacaaccccagcctgaagagcaggctgaccatcagcatcgacaccagcaagaccaccttcagcctgcagctgagcagcgtgaccggcgaggacaccgccatctactactgcgtgagggacagggtgaccggcgccttcgacatctggggccagggcaccaccgtgaccgtgagcagcgccagcaccggcggcggcggcagcggcggcggcggcagcggcggcggcggcagcggcggcggcggcagcgacatccagatgacccagagccccagcagcctggaggccagcgtgggcgacagggtgaccatcacctgccaggccagccaggacatcagcaactacctgaactggtaccagcagaagcccggcaagagccccaagctgctgatctacgacgccagcaacctggagaccggcgtgcccgacaggttcagcggcagcggcagcggcaccgacttcaccttcaccatcagcagcctgcaggccgaggacgagggcacctacttctgccagcacttcgaccacctgcccctggccttcggcggcggcaccaagctggagatcaagaggacccatcatcaccatcaccat

SEQ ID NO: 289 - DNA, 861 bp, Artificial Sequence
  Description of Artificial Sequence: Synthetic polynucleotide
atggagacagacacactcctgctatgggtactgctgctctgggttccaggttccactggtgacatcgtgctgacccagagcccccccagcctggccatgagcctgggcaagagggccaccatcagctgcagggccagcgagagcgtgaccatcctgggcagccacctgatccactggtaccagcagaagcccggccagccccccaccctgctgatccagctggccagcaacgtgcagaccggcgtgcccgccaggttcagcggcagcggcagcaggaccgacttcaccctgaccatcgaccccgtggaggaggacgacgtggccgtgtactactgcctgcagagcaggaccatccccaggaccttcggcggcggcaccaagctggagatcaagggcagcaccagcggcagcggcaagcccggcagcggcgagggcagcaccaagggccagatccagctggtgcagagcggccccgagctgaagaagcccggcgagaccgtgaagatcagctgcaaggccagcggctacaccttcaccgactacagcatcaactgggtgaagagggcccccggcaagggcctgaagtggatgggctggatcaacaccgagaccagggagcccgcctacgcctacgacttcaggggcaggttcgccttcagcctggagaccagcgccagcaccgcctacctgcagatcaacaacctgaagtacgaggacaccgccacctacttctgcgccctggactacagctacgccatggactactggggccagggcaccagcgtgaccgtgagcagcggaggaggtgggtctggaggtggaggatctggtggaggtgggtctcatcatcaccatcaccat

SEQ ID NO: 290 - DNA, 858 bp, Artificial Sequence
  Description of Artificial Sequence: Synthetic polynucleotide
atggagtttgggctgagctgggttttcctcgttgctctttttagaggtgtccagtgtcagatccagctggtgcagagcggccccgagctgaagaagcccggcgagaccgtgaagatcagctgcaaggccagcggctacaccttcaccgactacagcatcaactgggtgaagagggcccccggcaagggcctgaagtggatgggctggatcaacaccgagaccagggagcccgcctacgcctacgacttcaggggcaggttcgccttcagcctggagaccagcgccagcaccgcctacctgcagatcaacaacctgaagtacgaggacaccgccacctacttctgcgccctggactacagctacgccatggactactggggccagggcaccagcgtgaccgtgagcagcggcagcaccagcggcagcggcaagcccggcagcggcgagggcagcaccaagggcgacatcgtgctgacccagagcccccccagcctggccatgagcctgggcaagagggccaccatcagctgcagggccagcgagagcgtgaccatcctgggcagccacctgatccactggtaccagcagaagcccggccagccccccaccctgctgatccagctggccagcaacgtgcagaccggcgtgcccgccaggttcagcggcagcggcagcaggaccgacttcaccctgaccatcgaccccgtggaggaggacgacgtggccgtgtactactgcctgcagagcaggaccatccccaggaccttcggcggcggcaccaagctggagatcaagggaggaggtgggtctggaggtggaggatctggtggaggtgggtctcatcatcaccatcaccat

SEQ ID NO: 291 - DNA, 1695 bp, Artificial Sequence
  Description of Artificial Sequence: Synthetic polynucleotide
atgccacctcctcgcctcctcttcttcctcctcttcctcacccccatggaagtcaggcccgaggaacctctagtggtgaaggtggaagagggagataacgctgtgctgcagtgcctcaaggggacctcagatggccccactcagcagctgacctggtctcgggagtccccgcttaaacccttcttaaaactcagcctggggctgccaggcctgggaatccacatgaggcccctggccatctggcttttcatcttcaacgtctctcaacagatggggggcttctacctgtgccagccggggcccccctctgagaaggcctggcagcctggctggacagtcaatgtggagggcagcggggagctgttccggtggaatgtttcggacctaggtggcctgggctgtggcctgaagaacaggtcctcagagggccccagctccccttccgggaagctcatgagccccaagctgtatgtgtgggccaaagaccgccctgagatctgggagggagagcctccgtgtctcccaccgagggacagcctgaaccagagcctcagccaggacctcaccatggcccctggctccacactctggctgtcctgtggggtaccccctgactctgtgtccaggggccccctctcctggacccatgtgcaccccaaggggcctaagtcattgctgagcctagagctgaaggacgatcgcccggccagagatatgtgggtaatggagacgggtctgttgttgccccgggccacagctcaagacgctggaaagtattattgtcaccgtggcaacctgaccatgtcattccacctggagatcactgctcggccaggaggaggtgggtctggaggtggaggatctggtggaggtgggtctggaggaggtgggtctgacatcgtgctgacccagagcccccccagcctggccatgagcctgggcaagagggccaccatcagctgcagggccagcgagagcgtgaccatcctgggcagccacctgatccactggtaccagcagaagcccggccagccccccaccctgctgatccagctggccagcaacgtgcagaccggcgtgcccgccaggttcagcggcagcggcagcaggaccgacttcaccctgaccatcgaccccgtggaggaggacgacgtggccgtgtactactgcctgcagagcaggaccatccccaggaccttcggcggcggcaccaagctggagatcaagggcagcaccagcggcagcggcaagcccggcagcggcgagggcagcaccaagggccagatccagctggtgcagagcggccccgagctgaagaagcccggcgagaccgtgaagatcagctgcaaggccagcggctacaccttcaccgactacagcatcaactgggtgaagagggcccccggcaagggcctgaagtggatgggctggatcaacaccgagaccagggagcccgcctacgcctacgacttcaggggcaggttcgccttcagcctggagaccagcgccagcaccgcctacctgcagatcaacaacctgaagtacgaggacaccgccacctacttctgcgccctggactacagctacgccatggactactggggccagggcaccagcgtgaccgtgagcagcggaggaggtgggtctggaggtggaggatctggtggaggtgggtctcatcatcaccatcaccat

SEQ ID NO: 292 - DNA, 1695 bp, Artificial Sequence
  Description of Artificial Sequence: Synthetic polynucleotide
atgccacctcctcgcctcctcttcttcctcctcttcctcacccccatggaagtcaggcccgaggaacctctagtggtgaaggtggaagagggagataacgctgtgctgcagtgcctcaaggggacctcagatggccccactcagcagctgacctggtctcgggagtccccgcttaaacccttcttaaaactcagcctggggctgccaggcctgggaatccacatgaggcccctggccatctggcttttcatcttcaacgtctctcaacagatggggggcttctacctgtgccagccggggcccccctctgagaaggcctggcagcctggctggacagtcaatgtggagggcagcggggagctgttccggtggaatgtttcggacctaggtggcctgggctgtggcctgaagaacaggtcctcagagggccccagctccccttccgggaagctcatgagccccaagctgtatgtgtgggccaaagaccgccctgagatctgggagggagagcctccgtgtctcccaccgagggacagcctgaaccagagcctcagccaggacctcaccatggcccctggctccacactctggctgtcctgtggggtaccccctgactctgtgtccaggggccccctctcctggacccatgtgcaccccaaggggcctaagtcattgctgagcctagagctgaaggacgatcgcccggccagagatatgtgggtaatggagacgggtctgttgttgccccgggccacagctcaagacgctggaaagtattattgtcaccgtggcaacctgaccatgtcattccacctggagatcactgctcggccaggaggaggtgggtctggaggtggaggatctggtggaggtgggtctggaggaggtgggtctcagatccagctggtgcagagcggccccgagctgaagaagcccggcgagaccgtgaagatcagctgcaaggccagcggctacaccttcaccgactacagcatcaactgggtgaagagggcccccggcaagggcctgaagtggatgggctggatcaacaccgagaccagggagcccgcctacgcctacgacttcaggggcaggttcgccttcagcctggagaccagcgccagcaccgcctacctgcagatcaacaacctgaagtacgaggacaccgccacctacttctgcgccctggactacagctacgccatggactactggggccagggcaccagcgtgaccgtgagcagcggcagcaccagcggcagcggcaagcccggcagcggcgagggcagcaccaagggcgacatcgtgctgacccagagcccccccagcctggccatgagcctgggcaagagggccaccatcagctgcagggccagcgagagcgtgaccatcctgggcagccacctgatccactggtaccagcagaagcccggccagccccccaccctgctgatccagctggccagcaacgtgcagaccggcgtgcccgccaggttcagcggcagcggcagcaggaccgacttcaccctgaccatcgaccccgtggaggaggacgacgtggccgtgtactactgcctgcagagcaggaccatccccaggaccttcggcggcggcaccaagctggagatcaagggaggaggtgggtctggaggtggaggatctggtggaggtgggtctcatcatcaccatcaccat

SEQ ID NO: 293 - DNA, 2313 bp, Artificial Sequence
  Description of Artificial Sequence: Synthetic polynucleotide
atgccacctcctcgcctcctcttcttcctcctcttcctcacccccatggaagtcaggcccgaggaacctctagtggtgaaggtggaagagggagataacgctgtgctgcagtgcctcaaggggacctcagatggccccactcagcagctgacctggtctcgggagtccccgcttaaacccttcttaaaactcagcctggggctgccaggcctgggaatccacatgaggcccctggccatctggcttttcatcttcaacgtctctcaacagatggggggcttctacctgtgccagccggggcccccctctgagaaggcctggcagcctggctggacagtcaatgtggagggcagcggggagctgttccggtggaatgtttcggacctaggtggcctgggctgtggcctgaagaacaggtcctcagagggccccagctccccttccgggaagctcatgagccccaagctgtatgtgtgggccaaagaccgccctgagatctgggagggagagcctccgtgtctcccaccgagggacagcctgaaccagagcctcagccaggacctcaccatggcccctggctccacactctggctgtcctgtggggtaccccctgactctgtgtccaggggccccctctcctggacccatgtgcaccccaaggggcctaagtcattgctgagcctagagctgaaggacgatcgcccggccagagatatgtgggtaatggagacgggtctgttgttgccccgggccacagctcaagacgctggaaagtattattgtcaccgtggcaacctgaccatgtcattccacctggagatcactgctcggccagacaaaactcacacatgcccaccgtgcccagcacctgaactcctggggggaccgtcagtcttcctcttccccccaaaacccaaggacaccctcatgatctcccggacccctgaggtcacatgcgtggtggtggacgtgagccacgaagaccctgaggtcaagttcaactggtacgtggacggcgtggaggtgcataatgccaagacaaagccgcgggaggagcagtacaacagcacgtaccgtgtggtcagcgtcctcaccgtcctgcaccaggactggctgaatggcaaggagtacaagtgcaaggtctccaacaaagccctcccagcccccatcgagaaaaccatctccaaagccaaagggcagccccgagaaccacaggtgtacaccctgcccccatcccgggaggagatgaccaagaaccaggtcagcctgacctgcctggtcaaaggcttctatcccagcgacatcgccgtggagtgggagagcaatgggcagccggagaacaactacaagaccacgcctcccgtgctggactccgacggctccttcttcctctacagcaagctcaccgtggacaagagcaggtggcagcaggggaacgtcttctcatgctccgtgatgcacgaggctctgcacaaccactacacgcagaagagcctctccctgtctccgggtggaggaggtgggtctggaggtggaggatctggtggaggtgggtctggaggaggtgggtctgaggtgcagctggtggagtctggtggtggtcttgttcaacctggtggttctcttcgtctttcttgtgctgcttctggttttaatattaaagatacttatattcattgggttcgtcaagctcctggtaaaggtcttgaatgggttgctcgtatttatcctactaatggttatactcgttatgctgattctgttaaaggtcgttttactatttctgctgatacttctaaaaatactgcttatcttcaaatgaactctcttcgtgctgaagatactgctgtttattattgttctcgttggggtggtgatggtttttatgctatggattattggggtcaaggtactcttgtcaccgtctcctcagctagcaccgggggaggtgggtctggaggtggaggatctggtggaggtgggtctgacatccagatgacccagtctccttcttctctttctgcttctgttggtgatcgtgttactattacttgtcgtgcttctcaagatgttaatactgctgttgcttggtatcaacaaaaacctggtaaagctcctaaacttcttatttattctgcttcttttctttattctggtgttccttctcgtttttctggttctcgttctggtactgattttactcttactatttcttctcttcaacctgaagattttgctacttattattgtcaacaacattatactactcctcctacttttggtcaaggtaccaaggtggagatcaaacgtacg

SEQ ID NO: 294 - DNA, 2481 bp, Artificial Sequence
  Description of Artificial Sequence: Synthetic polynucleotide
atgccacctcctcgcctcctcttcttcctcctcttcctcacccccatggaagtcaggcccgaggaacctctagtggtgaaggtggaagagggagataacgctgtgctgcagtgcctcaaggggacctcagatggccccactcagcagctgacctggtctcgggagtccccgcttaaacccttcttaaaactcagcctggggctgccaggcctgggaatccacatgaggcccctggccatctggcttttcatcttcaacgtctctcaacagatggggggcttctacctgtgccagccggggcccccctctgagaaggcctggcagcctggctggacagtcaatgtggagggcagcggggagctgttccggtggaatgtttcggacctaggtggcctgggctgtggcctgaagaacaggtcctcagagggccccagctccccttccgggaagctcatgagccccaagctgtatgtgtgggccaaagaccgccctgagatctgggagggagagcctccgtgtctcccaccgagggacagcctgaaccagagcctcagccaggacctcaccatggcccctggctccacactctggctgtcctgtggggtaccccctgactctgtgtccaggggccccctctcctggacccatgtgcaccccaaggggcctaagtcattgctgagcctagagctgaaggacgatcgcccggccagagatatgtgggtaatggagacgggtctgttgttgccccgggccacagctcaagacgctggaaagtattattgtcaccgtggcaacctgaccatgtcattccacctggagatcactgctcggccagggggaggtgggtctggaggtggaggatctggtggaggtgggtctggtggaggtgggtctgaggtgcagctggtggagtctggtggtggtcttgttcaacctggtggttctcttcgtctttcttgtgctgcttctggttttaatattaaagatacttatattcattgggttcgtcaagctcctggtaaaggtcttgaatgggttgctcgtatttatcctactaatggttatactcgttatgctgattctgttaaaggtcgttttactatttctgctgatacttctaaaaatactgcttatcttcaaatgaactctcttcgtgctgaagatactgctgtttattattgttctcgttggggtggtgatggtttttatgctatggattattggggtcaaggtactcttgtcaccgtctcctcagctagcaccgggggaggtgggtctggaggtggaggatctggtggaggtgggtctgacatccagatgacccagtctccttcttctctttctgcttctgttggtgatcgtgttactattacttgtcgtgcttctcaagatgttaatactgctgttgcttggtatcaacaaaaacctggtaaagctcctaaacttcttatttattctgcttcttttctttattctggtgttccttctcgtttttctggttctcgttctggtactgattttactcttactatttcttctcttcaacctgaagattttgctacttattattgtcaacaacattatactactcctcctacttttggtcaaggtaccaaggtggagatcaaacgtacgggaggaggtgggtctggaggtggaggatctggtggaggtgggtctggaggaggtgggtctcaggtgcagctgcaggagagcggccccggcgacgtgaagcccagcgagaccctgagcctgacctgcaccgtgagcggcggcagcgtgagcagcggcgactactactggacctggatcaggcagagccccggcaagggcctggagtggatcggccacatctactacagcggcaacaccaactacaaccccagcctgaagagcaggctgaccatcagcatcgacaccagcaagaccaccttcagcctgcagctgagcagcgtgaccggcgaggacaccgccatctactactgcgtgagggacagggtgaccggcgccttcgacatctggggccagggcaccaccgtgaccgtgagcagcgccagcaccggcggaggtggcagcggcggaggtggcagcggcggaggtggcagcggcggaggtggcagcgacatccagatgacccagagccccagcagcctggaggccagcgtgggcgacagggtgaccatcacctgccaggccagccaggacatcagcaactacctgaactggtaccagcagaagcccggcaagagccccaagctgctgatctacgacgccagcaacctggagaccggcgtgcccgacaggttcagcggcagcggcagcggcaccgacttcaccttcaccatcagcagcctgcaggccgaggacgagggcacctacttctgccagcacttcgaccacctgcccctggccttcggcggcggcaccaagctggagatcaagaggaccggaggaggtgggtctcatcatcaccatcaccat

SEQ ID NO: 295 - DNA, 2481 bp, Artificial Sequence
  Description of Artificial Sequence: Synthetic polynucleotide
atgccacctcctcgcctcctcttcttcctcctcttcctcacccccatggaagtcaggcccgaggaacctctagtggtgaaggtggaagagggagataacgctgtgctgcagtgcctcaaggggacctcagatggccccactcagcagctgacctggtctcgggagtccccgcttaaacccttcttaaaactcagcctggggctgccaggcctgggaatccacatgaggcccctggccatctggcttttcatcttcaacgtctctcaacagatggggggcttctacctgtgccagccggggcccccctctgagaaggcctggcagcctggctggacagtcaatgtggagggcagcggggagctgttccggtggaatgtttcggacctaggtggcctgggctgtggcctgaagaacaggtcctcagagggccccagctccccttccgggaagctcatgagccccaagctgtatgtgtgggccaaagaccgccctgagatctgggagggagagcctccgtgtctcccaccgagggacagcctgaaccagagcctcagccaggacctcaccatggcccctggctccacactctggctgtcctgtggggtaccccctgactctgtgtccaggggccccctctcctggacccatgtgcaccccaaggggcctaagtcattgctgagcctagagctgaaggacgatcgcccggccagagatatgtgggtaatggagacgggtctgttgttgccccgggccacagctcaagacgctggaaagtattattgtcaccgtggcaacctgaccatgtcattccacctggagatcactgctcggccagggggaggtgggtctggaggtggaggatctggtggaggtgggtctggtggaggtgggtctgaggtgcagctggtggagtctggtggtggtcttgttcaacctggtggttctcttcgtctttcttgtgctgcttctggttttaatattaaagatacttatattcattgggttcgtcaagctcctggtaaaggtcttgaatgggttgctcgtatttatcctactaatggttatactcgttatgctgattctgttaaaggtcgttttactatttctgctgatacttctaaaaatactgcttatcttcaaatgaactctcttcgtgctgaagatactgctgtttattattgttctcgttggggtggtgatggtttttatgctatggattattggggtcaaggtactcttgtcaccgtctcctcagctagcaccgggggaggtgggtctggaggtggaggatctggtggaggtgggtctgacatccagatgacccagtctccttcttctctttctgcttctgttggtgatcgtgttactattacttgtcgtgcttctcaagatgttaatactgctgttgcttggtatcaacaaaaacctggtaaagctcctaaacttcttatttattctgcttcttttctttattctggtgttccttctcgtttttctggttctcgttctggtactgattttactcttactatttcttctcttcaacctgaagattttgctacttattattgtcaacaacattatactactcctcctacttttggtcaaggtaccaaggtggagatcaaacgtacgggaggaggtgggtctggaggtggaggatctggtggaggtgggtctggaggaggtgggtctgacatccagatgacccagagccccagcagcctggaggccagcgtgggcgacagggtgaccatcacctgccaggccagccaggacatcagcaactacctgaactggtaccagcagaagcccggcaagagccccaagctgctgatctacgacgccagcaacctggagaccggcgtgcccgacaggttcagcggcagcggcagcggcaccgacttcaccttcaccatcagcagcctgcaggccgaggacgagggcacctacttctgccagcacttcgaccacctgcccctggccttcggcggcggcaccaagctggagatcaagaggaccggcggaggtggcagcggcggaggtggcagcggcggaggtggcagcggcggaggtggcagccaggtgcagctgcaggagagcggccccggcgacgtgaagcccagcgagaccctgagcctgacctgcaccgtgagcggcggcagcgtgagcagcggcgactactactggacctggatcaggcagagccccggcaagggcctggagtggatcggccacatctactacagcggcaacaccaactacaaccccagcctgaagagcaggctgaccatcagcatcgacaccagcaagaccaccttcagcctgcagctgagcagcgtgaccggcgaggacaccgccatctactactgcgtgagggacagggtgaccggcgccttcgacatctggggccagggcaccaccgtgaccgtgagcagcgccagcaccggaggaggtgggtctcatcatcaccatcaccat

SEQ ID NO: 296 - DNA, 1644 bp, Artificial Sequence
  Description of Artificial Sequence: Synthetic polynucleotide
atggagtttgggctgagctgggttttcctcgttgctctttttagaggtgtccagtgtgaggtgcagctggtggagtctggtggtggtcttgttcaacctggtggttctcttcgtctttcttgtgctgcttctggttttaatattaaagatacttatattcattgggttcgtcaagctcctggtaaaggtcttgaatgggttgctcgtatttatcctactaatggttatactcgttatgctgattctgttaaaggtcgttttactatttctgctgatacttctaaaaatactgcttatcttcaaatgaactctcttcgtgctgaagatactgctgtttattattgttctcgttggggtggtgatggtttttatgctatggattattggggtcaaggtactcttgtcaccgtctcctcagctagcaccgggggaggtgggtctggaggtggaggatctggtggaggtgggtctgacatccagatgacccagtctccttcttctctttctgcttctgttggtgatcgtgttactattacttgtcgtgcttctcaagatgttaatactgctgttgcttggtatcaacaaaaacctggtaaagctcctaaacttcttatttattctgcttcttttctttattctggtgttccttctcgtttttctggttctcgttctggtactgattttactcttactatttcttctcttcaacctgaagattttgctacttattattgtcaacaacattatactactcctcctacttttggtcaaggtaccaaggtggagatcaaacgtacgggaggaggtgggtctggaggtggaggatctggtggaggtgggtctggaggaggtgggtctcaggtgcagctgcaggagagcggccccggcgacgtgaagcccagcgagaccctgagcctgacctgcaccgtgagcggcggcagcgtgagcagcggcgactactactggacctggatcaggcagagccccggcaagggcctggagtggatcggccacatctactacagcggcaacaccaactacaaccccagcctgaagagcaggctgaccatcagcatcgacaccagcaagaccaccttcagcctgcagctgagcagcgtgaccggcgaggacaccgccatctactactgcgtgagggacagggtgaccggcgccttcgacatctggggccagggcaccaccgtgaccgtgagcagcgccagcaccggcggaggtggcagcggcggaggtggcagcggcggaggtggcagcggcggaggtggcagcgacatccagatgacccagagccccagcagcctggaggccagcgtgggcgacagggtgaccatcacctgccaggccagccaggacatcagcaactacctgaactggtaccagcagaagcccggcaagagccccaagctgctgatctacgacgccagcaacctggagaccggcgtgcccgacaggttcagcggcagcggcagcggcaccgacttcaccttcaccatcagcagcctgcaggccgaggacgagggcacctacttctgccagcacttcgaccacctgcccctggccttcggcggcggcaccaagctggagatcaagaggaccggaggaggtgggtctcatcatcaccatcaccat

SEQ ID NO: 297 - DNA, 1644 bp, Artificial Sequence
  Description of Artificial Sequence: Synthetic polynucleotide
atggagtttgggctgagctgggttttcctcgttgctctttttagaggtgtccagtgtgaggtgcagctggtggagtctggtggtggtcttgttcaacctggtggttctcttcgtctttcttgtgctgcttctggttttaatattaaagatacttatattcattgggttcgtcaagctcctggtaaaggtcttgaatgggttgctcgtatttatcctactaatggttatactcgttatgctgattctgttaaaggtcgttttactatttctgctgatacttctaaaaatactgcttatcttcaaatgaactctcttcgtgctgaagatactgctgtttattattgttctcgttggggtggtgatggtttttatgctatggattattggggtcaaggtactcttgtcaccgtctcctcagctagcaccgggggaggtgggtctggaggtggaggatctggtggaggtgggtctgacatccagatgacccagtctccttcttctctttctgcttctgttggtgatcgtgttactattacttgtcgtgcttctcaagatgttaatactgctgttgcttggtatcaacaaaaacctggtaaagctcctaaacttcttatttattctgcttcttttctttattctggtgttccttctcgtttttctggttctcgttctggtactgattttactcttactatttcttctcttcaacctgaagattttgctacttattattgtcaacaacattatactactcctcctacttttggtcaaggtaccaaggtggagatcaaacgtacgggaggaggtgggtctggaggtggaggatctggtggaggtgggtctggaggaggtgggtctgacatccagatgacccagagccccagcagcctggaggccagcgtgggcgacagggtgaccatcacctgccaggccagccaggacatcagcaactacctgaactggtaccagcagaagcccggcaagagccccaagctgctgatctacgacgccagcaacctggagaccggcgtgcccgacaggttcagcggcagcggcagcggcaccgacttcaccttcaccatcagcagcctgcaggccgaggacgagggcacctacttctgccagcacttcgaccacctgcccctggccttcggcggcggcaccaagctggagatcaagaggaccggcggaggtggcagcggcggaggtggcagcggcggaggtggcagcggcggaggtggcagccaggtgcagctgcaggagagcggccccggcgacgtgaagcccagcgagaccctgagcctgacctgcaccgtgagcggcggcagcgtgagcagcggcgactactactggacctggatcaggcagagccccggcaagggcctggagtggatcggccacatctactacagcggcaacaccaactacaaccccagcctgaagagcaggctgaccatcagcatcgacaccagcaagaccaccttcagcctgcagctgagcagcgtgaccggcgaggacaccgccatctactactgcgtgagggacagggtgaccggcgccttcgacatctggggccagggcaccaccgtgaccgtgagcagcgccagcaccggaggaggtgggtctcatcatcaccatcaccat

SEQ ID NO: 298 - DNA, 2030 bp, Artificial Sequence; identical to SEQ ID NO: 277
  Description of Artificial Sequence: Synthetic polynucleotide

SEQ ID NO: 299 - DNA, 1515 bp, Artificial Sequence; identical to SEQ ID NO: 278
  Description of Artificial Sequence: Synthetic polynucleotide

SEQ ID NO: 300 - DNA, 828 bp, Artificial Sequence; identical to SEQ ID NO: 279
  Description of Artificial Sequence: Synthetic polynucleotide

SEQ ID NO: 301 - DNA, 1515 bp, Artificial Sequence; identical to SEQ ID NO: 280
  Description of Artificial Sequence: Synthetic polynucleotide

SEQ ID NO: 302 - DNA, 828 bp, Artificial Sequence; identical to SEQ ID NO: 281
  Description of Artificial Sequence: Synthetic polynucleotide

SEQ ID NO: 303 - DNA, 1476 bp, Artificial Sequence
  Description of Artificial Sequence: Synthetic polynucleotide
atggagtttgggctgagctgggttttcctcgttgctctttttagaggtgtccagtgtgaggtgcagctggtggagtctggtggtggtcttgttcaacctggtggttctcttcgtctttcttgtgctgcttctggttttaatattaaagatacttatattcattgggttcgtcaagctcctggtaaaggtcttgaatgggttgctcgtatttatcctactaatggttatactcgttatgctgattctgttaaaggtcgttttactatttctgctgatacttctaaaaatactgcttatcttcaaatgaactctcttcgtgctgaagatactgctgtttattattgttctcgttggggtggtgatggtttttatgctatggattattggggtcaaggtactcttgtcaccgtctcctcagctagcaccgggggaggtgggtctggaggtggaggatctggtggaggtgggtctgacatccagatgacccagtctccttcttctctttctgcttctgttggtgatcgtgttactattacttgtcgtgcttctcaagatgttaatactgctgttgcttggtatcaacaaaaacctggtaaagctcctaaacttcttatttattctgcttcttttctttattctggtgttccttctcgtttttctggttctcgttctggtactgattttactcttactatttcttctcttcaacctgaagattttgctacttattattgtcaacaacattatactactcctcctacttttggtcaaggtaccaaggtggagatcaaacgtacggacaaaactcacacatgcccaccgtgcccagcacctgaactcctggggggaccgtcagtcttcctcttccccccaaaacccaaggacaccctcatgatctcccggacccctgaggtcacatgcgtggtggtggacgtgagccacgaagaccctgaggtcaagttcaactggtacgtggacggcgtggaggtgcataatgccaagacaaagccgcgggaggagcagtacaacagcacgtaccgtgtggtcagcgtcctcaccgtcctgcaccaggactggctgaatggcaaggagtacaagtgcaaggtctccaacaaagccctcccagcccccatcgagaaaaccatctccaaagccaaagggcagccccgagaaccacaggtgtacaccctgcccccatcccgggaggagatgaccaagaaccaggtcagcctgacctgcctggtcaaaggcttctatcccagcgacatcgccgtggagtgggagagcaatgggcagccggagaacaactacaagaccacgcctcccgtgctggactccgacggctccttcttcctctacagcaagctcaccgtggacaagagcaggtggcagcaggggaacgtcttctcatgctccgtgatgcacgaggctctgcacaaccactacacgcagaagagcctctccctgtctccgggt

SEQ ID NO: 304 - DNA, 2391 bp, Artificial Sequence
  Description of Artificial Sequence: Synthetic polynucleotide
atgccacctcctcgcctcctcttcttcctcctcttcctcacccccatggaagtcaggcccgaggaacctctagtggtgaaggtggaagagggagataacgctgtgctgcagtgcctcaaggggacctcagatggccccactcagcagctgacctggtctcgggagtccccgcttaaacccttcttaaaactcagcctggggctgccaggcctgggaatccacatgaggcccctggccatctggcttttcatcttcaacgtctctcaacagatggggggcttctacctgtgccagccggggcccccctctgagaaggcctggcagcctggctggacagtcaatgtggagggcagcggggagctgttccggtggaatgtttcggacctaggtggcctgggctgtggcctgaagaacaggtcctcagagggccccagctccccttccgggaagctcatgagccccaagctgtatgtgtgggccaaagaccgccctgagatctgggagggagagcctccgtgtctcccaccgagggacagcctgaaccagagcctcagccaggacctcaccatggcccctggctccacactctggctgtcctgtggggtaccccctgactctgtgtccaggggccccctctcctggacccatgtgcaccccaaggggcctaagtcattgctgagcctagagctgaaggacgatcgcccggccagagatatgtgggtaatggagacgggtctgttgttgccccgggccacagctcaagacgctggaaagtattattgtcaccgtggcaacctgaccatgtcattccacctggagatcactgctcggccaggaggaggtgggtctggaggtggaggatctggtggaggtgggtctggaggaggtgggtctggaggaggtgggtctggaggtggaggatctggtggaggtgggtctatggcccaggtcaaactacaggagtcaggggctgagctggtgaagcctggggcctcagtgaagatgtcctgcaaggcttctggctacacatttaccagttacaatatgcactgggtaaagcagacacctggacagggcctggaatggattggagctatttatccaggaaatggtgatacttcctacaatcagaagttcaaaggcaaggccacattgactgcagacaaatcctccagcacagcctacatgcagctcagcagcctgacatctgaggactctgcggactattactgtgcaagatctaattattacggtagtagctactggttcttcgatgtctggggccaagggaccacggtcaccgtctcctcaggtggaggcggttcaggcggaggtggctctggcggtggcggatcggacatcgagctcactcagtctccaacaatcctgtctgcatctccaggggagaaggtcacaatgacttgcagggccagctcaagtgtaaattacatggactggtaccagaagaagccaggatcctcccccaaaccctggatttatgccacatccaacctggcttctggagtccctgctcgcttcagtggcagtgggtctgggacctcttactctctcacaatcagcagagtggaggctgaagatgctgccacttattactgccagcagtggagttttaatccacccacgttcggaggggggacaaagttggaaataaaacgggccgccgctggtgatcccgccgagcccaaatctcctgacaaaactcacacatgcccaccgtgcccagcacctgaactcctggggggaccgtcagtcttcctcttccccccaaaacccaaggacaccctcatgatctcccggacccctgaggtcacatgcgtggtggtggacgtgagccacgaagaccctgaggtcaagttcaactggtacgtggacggcgtggaggtgcataatgccaagacaaagccgcgggaggagcagtacaacagcacgtaccgtgtggtcagcgtcctcaccgtcctgcaccaggactggctgaatggcaaggagtacaagtgcaaggtctccaacaaagccctcccagcccccatcgagaaaaccatctccaaagccaaagggcagccccgagaaccacaggtgtacaccctgcccccatcccgggaggagatgaccaagaaccaggtcagcctgacctgcctggtcaaaggcttctatcccagcgacatcgccgtggagtgggagagcaatgggcagccggagaacaactacaagaccacgcctcccgtgctggactccgacggctccttcttcctctacagcaagctcaccgtggacaagagcaggtggcagcaggggaacgtcttctcatgctccgtgatgcacgaggctctgcacaaccactacacgcagaagagcctctccctgtctccgggt

SEQ ID NO: 305 - DNA, 1704 bp, Artificial Sequence
  Description of Artificial Sequence: Synthetic polynucleotide
atgccacctcctcgcctcctcttcttcctcctcttcctcacccccatggaagtcaggcccgaggaacctctagtggtgaaggtggaagagggagataacgctgtgctgcagtgcctcaaggggacctcagatggccccactcagcagctgacctggtctcgggagtccccgcttaaacccttcttaaaactcagcctggggctgccaggcctgggaatccacatgaggcccctggccatctggcttttcatcttcaacgtctctcaacagatggggggcttctacctgtgccagccggggcccccctctgagaaggcctggcagcctggctggacagtcaatgtggagggcagcggggagctgttccggtggaatgtttcggacctaggtggcctgggctgtggcctgaagaacaggtcctcagagggccccagctccccttccgggaagctcatgagccccaagctgtatgtgtgggccaaagaccgccctgagatctgggagggagagcctccgtgtctcccaccgagggacagcctgaaccagagcctcagccaggacctcaccatggcccctggctccacactctggctgtcctgtggggtaccccctgactctgtgtccaggggccccctctcctggacccatgtgcaccccaaggggcctaagtcattgctgagcctagagctgaaggacgatcgcccggccagagatatgtgggtaatggagacgggtctgttgttgccccgggccacagctcaagacgctggaaagtattattgtcaccgtggcaacctgaccatgtcattccacctggagatcactgctcggccaggaggaggtgggtctggaggtggaggatctggtggaggtgggtctggaggaggtgggtctggaggaggtgggtctggaggtggaggatctggtggaggtgggtctatggcccaggtcaaactacaggagtcaggggctgagctggtgaagcctggggcctcagtgaagatgtcctgcaaggcttctggctacacatttaccagttacaatatgcactgggtaaagcagacacctggacagggcctggaatggattggagctatttatccaggaaatggtgatacttcctacaatcagaagttcaaaggcaaggccacattgactgcagacaaatcctccagcacagcctacatgcagctcagcagcctgacatctgaggactctgcggactattactgtgcaagatctaattattacggtagtagctactggttcttcgatgtctggggccaagggaccacggtcaccgtctcctcaggtggaggcggttcaggcggaggtggctctggcggtggcggatcggacatcgagctcactcagtctccaacaatcctgtctgcatctccaggggagaaggtcacaatgacttgcagggccagctcaagtgtaaattacatggactggtaccagaagaagccaggatcctcccccaaaccctggatttatgccacatccaacctggcttctggagtccctgctcgcttcagtggcagtgggtctgggacctcttactctctcacaatcagcagagtggaggctgaagatgctgccacttattactgccagcagtggagttttaatccacccacgttcggaggggggacaaagttggaaataaaacgggccgccgctcatcatcaccatcaccat

SEQ ID NO: 306 - DNA, 2337 bp, Artificial Sequence
  Description of Artificial Sequence: Synthetic polynucleotide
atgccacctcctcgcctcctcttcttcctcctcttcctcacccccatggaagtcaggcccgaggaacctctagtggtgaaggtggaagagggagataacgctgtgctgcagtgcctcaaggggacctcagatggccccactcagcagctgacctggtctcgggagtccccgcttaaacccttcttaaaactcagcctggggctgccaggcctgggaatccacatgaggcccctggccatctggcttttcatcttcaacgtctctcaacagatggggggcttctacctgtgccagccggggcccccctctgagaaggcctggcagcctggctggacagtcaatgtggagggcagcggggagctgttccggtggaatgtttcggacctaggtggcctgggctgtggcctgaagaacaggtcctcagagggccccagctccccttccgggaagctcatgagccccaagctgtatgtgtgggccaaagaccgccctgagatctgggagggagagcctccgtgtctcccaccgagggacagcctgaaccagagcctcagccaggacctcaccatggcccctggctccacactctggctgtcctgtggggtaccccctgactctgtgtccaggggccccctctcctggacccatgtgcaccccaaggggcctaagtcattgctgagcctagagctgaaggacgatcgcccggccagagatatgtgggtaatggagacgggtctgttgttgccccgggccacagctcaagacgctggaaagtattattgtcaccgtggcaacctgaccatgtcattccacctggagatcactgctcggccagatcccgccgagcccaaatctcctgacaaaactcacacatgcccaccgtgcccagcacctgaactcctggggggaccgtcagtcttcctcttccccccaaaacccaaggacaccctcatgatctcccggacccctgaggtcacatgcgtggtggtggacgtgagccacgaagaccctgaggtcaagttcaactggtacgtggacggcgtggaggtgcataatgccaagacaaagccgcgggaggagcagtacaacagcacgtaccgtgtggtcagcgtcctcaccgtcctgcaccaggactggctgaatggcaaggagtacaagtgcaaggtctccaacaaagccctcccagcccccatcgagaaaaccatctccaaagccaaagggcagccccgagaaccacaggtgtacaccctgcccccatcccgggaggagatgaccaagaaccaggtcagcctgacctgcctggtcaaaggcttctatcccagcgacatcgccgtggagtgggagagcaatgggcagccggagaacaactacaagaccacgcctcccgtgctggactccgacggctccttcttcctctacagcaagctcaccgtggacaagagcaggtggcagcaggggaacgtcttctcatgctccgtgatgcacgaggctctgcacaaccactacacgcagaagagcctctccctgtctccgggtggaggaggtgggtctggaggtggaggatctggtggaggtgggtctggaggaggtgggtctatggcccaggtcaaactacaggagtcaggggctgagctggtgaagcctggggcctcagtgaagatgtcctgcaaggcttctggctacacatttaccagttacaatatgcactgggtaaagcagacacctggacagggcctggaatggattggagctatttatccaggaaatggtgatacttcctacaatcagaagttcaaaggcaaggccacattgactgcagacaaatcctccagcacagcctacatgcagctcagcagcctgacatctgaggactctgcggactattactgtgcaagatctaattattacggtagtagctactggttcttcgatgtctggggccaagggaccacggtcaccgtctcctcaggtggaggcggttcaggcggaggtggctctggcggtggcggatcggacatcgagctcactcagtctccaacaatcctgtctgcatctccaggggagaaggtcacaatgacttgcagggccagctcaagtgtaaattacatggactggtaccagaagaagccaggatcctcccccaaaccctggatttatgccacatccaacctggcttctggagtccctgctcgcttcagtggcagtgggtctgggacctcttactctctcacaatcagcagagtggaggctgaagatgctgccacttattactgccagcagtggagttttaatccacccacgttcggaggggggacaaagttggaaataaaacgggct

SEQ ID NO: 307 - DNA, 2349 bp, Artificial Sequence
  Description of Artificial Sequence: Synthetic polynucleotide
atggattttcaggtgcagattttcagcttcctgctaatcagtgcctcagtcataatgtctagaatggcccaggtcaaactacaggagtcaggggctgagctggtgaagcctggggcctcagtgaagatgtcctgcaaggcttctggctacacatttaccagttacaatatgcactgggtaaagcagacacctggacagggcctggaatggattggagctatttatccaggaaatggtgatacttcctacaatcagaagttcaaaggcaaggccacattgactgcagacaaatcctccagcacagcctacatgcagctcagcagcctgacatctgaggactctgcggactattactgtgcaagatctaattattacggtagtagctactggttcttcgatgtctggggccaagggaccacggtcaccgtctcctcaggtggaggcggttcaggcggaggtggctctggcggtggcggatcggacatcgagctcactcagtctccaacaatcctgtctgcatctccaggggagaaggtcacaatgacttgcagggccagctcaagtgtaaattacatggactggtaccagaagaagccaggatcctcccccaaaccctggatttatgccacatccaacctggcttctggagtccctgctcgcttcagtggcagtgggtctgggacctcttactctctcacaatcagcagagtggaggctgaagatgctgccacttattactgccagcagtggagttttaatccacccacgttcggaggggggacaaagttggaaataaaacgggccgccgctggaggaggtgggtctggaggtggaggatctggtggaggtgggtctggaggaggtgggtctcccgaggaacctctagtggtgaaggtggaagagggagataacgctgtgctgcagtgcctcaaggggacctcagatggccccactcagcagctgacctggtctcgggagtccccgcttaaacccttcttaaaactcagcctggggctgccaggcctgggaatccacatgaggcccctggccatctggcttttcatcttcaacgtctctcaacagatggggggcttctacctgtgccagccggggcccccctctgagaaggcctggcagcctggctggacagtcaatgtggagggcagcggggagctgttccggtggaatgtttcggacctaggtggcctgggctgtggcctgaagaacaggtcctcagagggccccagctccccttccgggaagctcatgagccccaagctgtatgtgtgggccaaagaccgccctgagatctgggagggagagcctccgtgtctcccaccgagggacagcctgaaccagagcctcagccaggacctcaccatggcccctggctccacactctggctgtcctgtggggtaccccctgactctgtgtccaggggccccctctcctggacccatgtgcaccccaaggggcctaagtcattgctgagcctagagctgaaggacgatcgcccggccagagatatgtgggtaatggagacgggtctgttgttgccccgggccacagctcaagacgctggaaagtattattgtcaccgtggcaacctgaccatgtcattccacctggagatcactgctcggccagatcccgccgagcccaaatctcctgacaaaactcacacatgcccaccgtgcccagcacctgaactcctggggggaccgtcagtcttcctcttccccccaaaacccaaggacaccctcatgatctcccggacccctgaggtcacatgcgtggtggtggacgtgagccacgaagaccctgaggtcaagttcaactggtacgtggacggcgtggaggtgcataatgccaagacaaagccgcgggaggagcagtacaacagcacgtaccgtgtggtcagcgtcctcaccgtcctgcaccaggactggctgaatggcaaggagtacaagtgcaaggtctccaacaaagccctcccagcccccatcgagaaaaccatctccaaagccaaagggcagccccgagaaccacaggtgtacaccctgcccccatcccgggaggagatgaccaagaaccaggtcagcctgacctgcctggtcaaaggcttctatcccagcgacatcgccgtggagtgggagagcaatgggcagccggagaacaactacaagaccacgcctcccgtgctggactccgacggctccttcttcctctacagcaagctcaccgtggacaagagcaggtggcagcaggggaacgtcttctcatgctccgtgatgcacgaggctctgcacaaccactacacgcagaagagcctctccctgtctccgggt

SEQ ID NO: 308 - DNA, 3318 bp, Artificial Sequence
  Description of Artificial Sequence: Synthetic polynucleotide
atgctcaggctgctcttggctctcaacttattcccttcaattcaagtaacaggagacatccagatgacacagactacatcctccctgtctgcctctctgggagacagagtcaccatcagttgcagggcaagtcaggacattagtaaatatttaaattggtatcagcagaaaccagatggaactgttaaactcctgatctaccatacatcaagattacactcaggagtcccatcaaggttcagtggcagtgggtctggaacagattattctctcaccattagcaacctggagcaagaagatattgccacttacttttgccaacagggtaatacgcttccgtacacgttcggaggggggactaagttggaaataacaggaggaggtgggtctggaggtggaggatctggtggaggtgggtctggaggaggtgggtctgaggtgaaactgcaggagtcaggacctggcctggtggcgccctcacagagcctgtccgtcacatgcactgtctcaggggtctcattacccgactatggtgtaagctggattcgccagcctccacgaaagggtctggagtggctgggagtaatatggggtagtgaaaccacatactataattcagctctcaaatccagactgaccatcatcaaggacaactccaagagccaagttttcttaaaaatgaacagtctgcaaactgatgacacagccatttactactgtgccaaacattattactacggtggtagctatgctatggactactggggtcaaggaacctcagtcaccgtctcctcagactacaaagacgatgacgacaagattgaagttatgtatcctcctccttacctagacaatgagaagagcaatggaaccattatccatgtgaaagggaaacacctttgtccaagtcccctatttcccggaccttctaagcccttttgggtgctggtggtggttggtggagtcctggcttgctatagcttgctagtaacagtggcctttattattttctgggtgaggagtaagaggagcaggctcctgcacagtgactacatgaacatgactccccgccgccccgggcccacccgcaagcattaccagccctatgccccaccacgcgacttcgcagcctatcgctccaaacggggcagaaagaaactcctgtatatattcaaacaaccatttatgagaccagtacaaactactcaagaggaagatggctgtagctgccgatttccagaagaagaagaaggaggatgtgaactgagagtgaagttcagcaggagcgcagacgcccccgcgtaccagcagggccagaaccagctctataacgagctcaatctaggacgaagagaggagtacgatgttttggacaagagacgtggccgggaccctgagatggggggaaagccgcagagaaggaagaaccctcaggaaggcctgtacaatgaactgcagaaagataagatggcggaggcctacagtgagattgggatgaaaggcgagcgccggaggggcaaggggcacgatggcctttaccagggtctcagtacagccaccaaggacacctacgacgcccttcacatgcaggccctgccccctcgcgagggcagaggaagtcttctaacatgcggtgacgtggaggagaatcccggccctatgccacctcctcgcctcctcttcttcctcctcttcctcacccccatggaagtcaggcccgaggaacctctagtggtgaaggtggaagagggagataacgctgtgctgcagtgcctcaaggggacctcagatggccccactcagcagctgacctggtctcgggagtccccgcttaaacccttcttaaaactcagcctggggctgccaggcctgggaatccacatgaggcccctggccatctggcttttcatcttcaacgtctctcaacagatggggggcttctacctgtgccagccggggcccccctctgagaaggcctggcagcctggctggacagtcaatgtggagggcagcggggagctgttccggtggaatgtttcggacctaggtggcctgggctgtggcctgaagaacaggtcctcagagggccccagctccccttccgggaagctcatgagccccaagctgtatgtgtgggccaaagaccgccctgagatctgggagggagagcctccgtgtctcccaccgagggacagcctgaaccagagcctcagccaggacctcaccatggcccctggctccacactctggctgtcctgtggggtaccccctgactctgtgtccaggggccccctctcctggacccatgtgcaccccaaggggcctaagtcattgctgagcctagagctgaaggacgatcgcccggccagagatatgtgggtaatggagacgggtctgttgttgccccgggccacagctcaagacgctggaaagtattattgtcaccgtggcaacctgaccatgtcattccacctggagatcactgctcggccagggggaggtgggtctggaggtggaggatctggtggaggtgggtctggtggaggtgggtctgaggtgcagctggtggagtctggtggtggtcttgttcaacctggtggttctcttcgtctttcttgtgctgcttctggttttaatattaaagatacttatattcattgggttcgtcaagctcctggtaaaggtcttgaatgggttgctcgtatttatcctactaatggttatactcgttatgctgattctgttaaaggtcgttttactatttctgctgatacttctaaaaatactgcttatcttcaaatgaactctcttcgtgctgaagatactgctgtttattattgttctcgttggggtggtgatggtttttatgctatggattattggggtcaaggtactcttgtcaccgtctcctcagctagcaccgggggaggtgggtctggaggtggaggatctggtggaggtgggtctgacatccagatgacccagtctccttcttctctttctgcttctgttggtgatcgtgttactattacttgtcgtgcttctcaagatgttaatactgctgttgcttggtatcaacaaaaacctggtaaagctcctaaacttcttatttattctgcttcttttctttattctggtgttccttctcgtttttctggttctcgttctggtactgattttactcttactatttcttctcttcaacctgaagattttgctacttattattgtcaacaacattatactactcctcctacttttggtcaaggtaccaaggtggagatcaaacgtacgtctagacatcatcaccatcaccat

SEQ ID NO: 309 - DNA, 3318 bp, Artificial Sequence
  Description of Artificial Sequence: Synthetic polynucleotide
atgccacctcctcgcctcctcttcttcctcctcttcctcacccccatggaagtcaggcccgaggaacctctagtggtgaaggtggaagagggagataacgctgtgctgcagtgcctcaaggggacctcagatggccccactcagcagctgacctggtctcgggagtccccgcttaaacccttcttaaaactcagcctggggctgccaggcctgggaatccacatgaggcccctggccatctggcttttcatcttcaacgtctctcaacagatggggggcttctacctgtgccagccggggcccccctctgagaaggcctggcagcctggctggacagtcaatgtggagggcagcggggagctgttccggtggaatgtttcggacctaggtggcctgggctgtggcctgaagaacaggtcctcagagggccccagctccccttccgggaagctcatgagccccaagctgtatgtgtgggccaaagaccgccctgagatctgggagggagagcctccgtgtctcccaccgagggacagcctgaaccagagcctcagccaggacctcaccatggcccctggctccacactctggctgtcctgtggggtaccccctgactctgtgtccaggggccccctctcctggacccatgtgcaccccaaggggcctaagtcattgctgagcctagagctgaaggacgatcgcccggccagagatatgtgggtaatggagacgggtctgttgttgccccgggccacagctcaagacgctggaaagtattattgtcaccgtggcaacctgaccatgtcattccacctggagatcactgctcggccagggggaggtgggtctggaggtggaggatctggtggaggtgggtctggtggaggtgggtctgaggtgcagctggtggagtctggtggtggtcttgttcaacctggtggttctcttcgtctttcttgtgctgcttctggttttaatattaaagatacttatattcattgggttcgtcaagctcctggtaaaggtcttgaatgggttgctcgtatttatcctactaatggttatactcgttatgctgattctgttaaaggtcgttttactatttctgctgatacttctaaaaatactgcttatcttcaaatgaactctcttcgtgctgaagatactgctgtttattattgttctcgttggggtggtgatggtttttatgctatggattattggggtcaaggtactcttgtcaccgtctcctcagctagcaccgggggaggtgggtctggaggtggaggatctggtggaggtgggtctgacatccagatgacccagtctccttcttctctttctgcttctgttggtgatcgtgttactattacttgtcgtgcttctcaagatgttaatactgctgttgcttggtatcaacaaaaacctggtaaagctcctaaacttcttatttattctgcttcttttctttattctggtgttccttctcgtttttctggttctcgttctggtactgattttactcttactatttcttctcttcaacctgaagattttgctacttattattgtcaacaacattatactactcctcctacttttggtcaaggtaccaaggtggagatcaaacgtacgtctagacatcatcaccatcaccatgagggcagaggaagtcttctaacatgcggtgacgtggaggagaatcccggccctatgctcaggctgctcttggctctcaacttattcccttcaattcaagtaacaggagacatccagatgacacagactacatcctccctgtctgcctctctgggagacagagtcaccatcagttgcagggcaagtcaggacattagtaaatatttaaattggtatcagcagaaaccagatggaactgttaaactcctgatctaccatacatcaagattacactcaggagtcccatcaaggttcagtggcagtgggtctggaacagattattctctcaccattagcaacctggagcaagaagatattgccacttacttttgccaacagggtaatacgcttccgtacacgttcggaggggggactaagttggaaataacaggaggaggtgggtctggaggtggaggatctggtggaggtgggtctggaggaggtgggtctgaggtgaaactgcaggagtcaggacctggcctggtggcgccctcacagagcctgtccgtcacatgcactgtctcaggggtctcattacccgactatggtgtaagctggattcgccagcctccacgaaagggtctggagtggctgggagtaatatggggtagtgaaaccacatactataattcagctctcaaatccagactgaccatcatcaaggacaactccaagagccaagttttcttaaaaatgaacagtctgcaaactgatgacacagccatttactactgtgccaaacattattactacggtggtagctatgctatggactactggggtcaaggaacctcagtcaccgtctcctcagactacaaagacgatgacgacaagattgaagttatgtatcctcctccttacctagacaatgagaagagcaatggaaccattatccatgtgaaagggaaacacctttgtccaagtcccctatttcccggaccttctaagcccttttgggtgctggtggtggttggtggagtcctggcttgctatagcttgctagtaacagtggcctttattattttctgggtgaggagtaagaggagcaggctcctgcacagtgactacatgaacatgactccccgccgccccgggcccacccgcaagcattaccagccctatgccccaccacgcgacttcgcagcctatcgctccaaacggggcagaaagaaactcctgtatatattcaaacaaccatttatgagaccagtacaaactactcaagaggaagatggctgtagctgccgatttccagaagaagaagaaggaggatgtgaactgagagtgaagttcagcaggagcgcagacgcccccgcgtaccagcagggccagaaccagctctataacgagctcaatctaggacgaagagaggagtacgatgttttggacaagagacgtggccgggaccctgagatggggggaaagccgcagagaaggaagaaccctcaggaaggcctgtacaatgaactgcagaaagataagatggcggaggcctacagtgagattgggatgaaaggcgagcgccggaggggcaaggggcacgatggcctttaccagggtctcagtacagccaccaaggacacctacgacgcccttcacatgcaggccctgccccctcgc

SEQ ID NO: 310 - DNA, 2030 bp, Artificial Sequence; identical to SEQ ID NO: 277
  Description of Artificial Sequence: Synthetic polynucleotide

SEQ ID NO: 311 - DNA, 1653 bp, Artificial Sequence
  Description of Artificial Sequence: Synthetic polynucleotide
atgccacctcctcgcctcctcttcttcctcctcttcctcacccccatggaagtcaggcccgaggaacctctagtggtgaaggtggaagagggagataacgctgtgctgcagtgcctcaaggggacctcagatggccccactcagcagctgacctggtctcgggagtccccgcttaaacccttcttaaaactcagcctggggctgccaggcctgggaatccacatgaggcccctggccatctggcttttcatcttcaacgtctctcaacagatggggggcttctacctgtgccagccggggcccccctctgagaaggcctggcagcctggctggacagtcaatgtggagggcagcggggagctgttccggtggaatgtttcggacctaggtggcctgggctgtggcctgaagaacaggtcctcagagggccccagctccccttccgggaagctcatgagccccaagctgtatgtgtgggccaaagaccgccctgagatctgggagggagagcctccgtgtctcccaccgagggacagcctgaaccagagcctcagccaggacctcaccatggcccctggctccacactctggctgtcctgtggggtaccccctgactctgtgtccaggggccccctctcctggacccatgtgcaccccaaggggcctaagtcattgctgagcctagagctgaaggacgatcgcccggccagagatatgtgggtaatggagacgggtctgttgttgccccgggccacagctcaagacgctggaaagtattattgtcaccgtggcaacctgaccatgtcattccacctggagatcactgctcggccagggggaggtgggtctggaggtggaggatctggtggaggtgggtctggtggaggtgggtctgaggtgcagctggtggagtctggtggtggtcttgttcaacctggtggttctcttcgtctttcttgtgctgcttctggttttaatattaaagatacttatattcattgggttcgtcaagctcctggtaaaggtcttgaatgggttgctcgtatttatcctactaatggttatactcgttatgctgattctgttaaaggtcgttttactatttctgctgatacttctaaaaatactgcttatcttcaaatgaactctcttcgtgctgaagatactgctgtttattattgttctcgttggggtggtgatggtttttatgctatggattattggggtcaaggtactcttgtcaccgtctcctcagctagcaccgggggaggtgggtctggaggtggaggatctggtggaggtgggtctgacatccagatgacccagtctccttcttctctttctgcttctgttggtgatcgtgttactattacttgtcgtgcttctcaagatgttaatactgctgttgcttggtatcaacaaaaacctggtaaagctcctaaacttcttatttattctgcttcttttctttattctggtgttccttctcgtttttctggttctcgttctggtactgattttactcttactatttcttctcttcaacctgaagattttgctacttattattgtcaacaacattatactactcctcctacttttggtcaaggtaccaaggtggagatcaaacgtacgcaccaccatcaccaccat

SEQ ID NO: 312 - DNA, 873 bp, Artificial Sequence
  Description of Artificial Sequence: Synthetic polynucleotide
atgccacctcctcgcctcctcttcttcctcctcttcctcacccccatggaagtcaggcccgaggaacctctagtggtgaaggtggaagagggagataacgctgtgctgcagtgcctcaaggggacctcagatggccccactcagcagctgacctggtctcgggagtccccgcttaaacccttcttaaaactcagcctggggctgccaggcctgggaatccacatgaggcccctggccatctggcttttcatcttcaacgtctctcaacagatggggggcttctacctgtgccagccggggcccccctctgagaaggcctggcagcctggctggacagtcaatgtggagggcagcggggagctgttccggtggaatgtttcggacctaggtggcctgggctgtggcctgaagaacaggtcctcagagggccccagctccccttccgggaagctcatgagccccaagctgtatgtgtgggccaaagaccgccctgagatctgggagggagagcctccgtgtctcccaccgagggacagcctgaaccagagcctcagccaggacctcaccatggcccctggctccacactctggctgtcctgtggggtaccccctgactctgtgtccaggggccccctctcctggacccatgtgcaccccaaggggcctaagtcattgctgagcctagagctgaaggacgatcgcccggccagagatatgtgggtaatggagacgggtctgttgttgccccgggccacagctcaagacgctggaaagtattattgtcaccgtggcaacctgaccatgtcattccacctggagatcactgctcggccagtactatggcactggctgctgaggactggtggctggaag

SEQ ID NO: 313 - DNA, 1605 bp, Artificial Sequence; identical to SEQ ID NO: 271
  Description of Artificial Sequence: Synthetic polynucleotide

SEQ ID NO: 314 - DNA, 1581 bp, Artificial Sequence
  Description of Artificial Sequence: Synthetic polynucleotide
atgctcaggctgctcttggctctcaacttattcccttcaattcaagtaacaggagacatccagatgacacagactacatcctccctgtctgcctctctgggagacagagtcaccatcagttgcagggcaagtcaggacattagtaaatatttaaattggtatcagcagaaaccagatggaactgttaaactcctgatctaccatacatcaagattacactcaggagtcccatcaaggttcagtggcagtgggtctggaacagattattctctcaccattagcaacctggagcaagaagatattgccacttacttttgccaacagggtaatacgcttccgtacacgttcggaggggggactaagttggaaataacaggaggaggtgggtctggaggtggaggatctggtggaggtgggtctggaggaggtgggtctgaggtgaaactgcaggagtcaggacctggcctggtggcgccctcacagagcctgtccgtcacatgcactgtctcaggggtctcattacccgactatggtgtaagctggattcgccagcctccacgaaagggtctggagtggctgggagtaatatggggtagtgaaaccacatactataattcagctctcaaatccagactgaccatcatcaaggacaactccaagagccaagttttcttaaaaatgaacagtctgcaaactgatgacacagccatttactactgtgccaaacattattactacggtggtagctatgctatggactactggggtcaaggaacctcagtcaccgtctcctcaattgaagttatgtatcctcctccttacctagacaatgagaagagcaatggaaccattatccatgtgaaagggaaacacctttgtccaagtcccctatttcccggaccttctaagcccttttgggtgctggtggtggttggtggagtcctggcttgctatagcttgctagtaacagtggcctttattattttctgggtgaggagtaagaggagcaggctcctgcacagtgactacatgaacatgactccccgccgccccgggcccacccgcaagcattaccagccctatgccccaccacgcgacttcgcagcctatcgctccaaacggggcagaaagaaactcctgtatatattcaaacaaccatttatgagaccagtacaaactactcaagaggaagatggctgtagctgccgatttccagaagaagaagaaggaggatgtgaactgagagtgaagttcagcaggagcgcagacgcccccgcgtaccagcagggccagaaccagctctataacgagctcaatctaggacgaagagaggagtacgatgttttggacaagagacgtggccgggaccctgagatggggggaaagccgcagagaaggaagaaccctcaggaaggcctgtacaatgaactgcagaaagataagatggcggaggcctacagtgagattgggatgaaaggcgagcgccggaggggcaaggggcacgatggcctttaccagggtctcagtacagccaccaaggacacctacgacgcccttcacatgcaggccctgccccctcgc

SEQ ID NO: 315 - DNA, 1398 bp, Artificial Sequence
  Description of Artificial Sequence: Synthetic polynucleotide
atggagaaggacaccctgctgctgtgggtgctgctgctgtgggtgcccggcagcaccggcgaggtgaagctggtggagagcggcggcggcctggtgcagcccggcggcagcctgaagctgagctgcgccgccagcggcttcgacttcagcaggtactggatgagctgggtgaggcaggcccccggcaagggcctggagtggatcggcgagatcaacctggacagcagcaccatcaactacacccccagcctgaaggacaagttcatcatcagcagggacaacgccaagaacaccctgtacctgcagatgagcaaggtgaggagcgaggacaccgccctgtactactgcgccaggaggtacgacgccatggactactggggccagggcaccagcgtgaccgtgagcagcgccaagaccaccgcccccagcgtgtaccccctggcccccgtgtgcggcgacaccaccggcagcagcgtgaccctgggctgcctggtgaagggctacttccccgagcccgtgaccctgacctggaacagcggcagcctgagcagcggcgtgcacaccttccccgccgtgctgcagagcgacctgtacaccctgagcagcagcgtgaccgtgaccagcagcacctggcccagccagagcatcacctgcaacgtggcccaccccgccagcagcaccaaggtggacaagaagatcgagcccaggggccccaccatcaagccctgccccccctgcaagtgccccgcccccaacctgctgggcggccccagcgtgttcatcttcccccccaagatcaaggacgtgctgatgatcagcctgagccccatcgtgacctgcgtggtggtggacgtgagcgaggacgaccccgacgtgcagatcagctggttcgtgaacaacgtggaggtgcacaccgcccagacccagacccacagggaggactacaacagcaccctgagggtggtgagcgccctgcccatccagcaccaggactggatgagcggcaaggagttcaagtgcaaggtgaacaacaaggacctgcccgcccccatcgagaggaccatcagcaagcccaagggcagcgtgagggccccccaggtgtacgtgctgcccccccccgaggaggagatgaccaagaagcaggtgaccctgacctgcatggtgaccgacttcatgcccgaggacatctacgtggagtggaccaacaacggcaagaccgagctgaactacaagaacaccgagcccgtgctggacagcgacggcagctacttcatgtacagcaagctgagggtggagaagaagaactgggtggagaggaacagctacagctgcagcgtggtgcacgagggcctgcacaaccaccacaccaccaagagcttcagcaggacccccggcaag

SEQ ID NO: 316 - DNA, 708 bp, Artificial Sequence
  Description of Artificial Sequence: Synthetic polynucleotide
atggacttcggcctgatcttcttcatcgtggccctgctgaagggcgtgcagtgcgacatcgtgctgacccagagccccgccagcctggccgtgagcctgggccagagggccaccatcagctgcagggccagcgagagcgtggacgactacggcatcagcttcatgaactggttccagcagaagcccggccagccccccaagctgctgatctacgccgcccccaaccagggcagcggcgtgcccgccaggttcagcggcagcggcagcggcaccgacttcagcctgaacatccaccccatggaggaggacgacaccgccatgtacttctgccagcagagcaaggacgtgaggtggaccttcggcggcggcaccaagctggagatcaagagggccgacgccgcccccaccgtgagcatcttcccccccagcagcgagcagctgaccagcggcggcgccagcgtggtgtgcttcctgaacaacttctaccccaaggacatcaacgtgaagtggaagatcgacggcagcgagaggcagaacggcgtgctgaacagctggaccgaccaggacagcaaggacagcacctacagcatgagcagcaccctgaccctgaccaaggacgagtacgagaggcacaacagctacacctgcgaggccacccacaagaccagcaccagccccatcgtgaagagcttcaacaggaacgagtgc

SEQ ID NO: 317 - DNA, 1644 bp, Artificial Sequence
  Description of Artificial Sequence: Synthetic polynucleotide
atggagaaggacaccctgctgctgtgggtgctgctgctgtgggtgcccggcagcaccggcgaggtgaagctggtggagagcggcggcggcctggtgcagcccggcggcagcctgaagctgagctgcgccgccagcggcttcgacttcagcaggtactggatgagctgggtgaggcaggcccccggcaagggcctggagtggatcggcgagatcaacctggacagcagcaccatcaactacacccccagcctgaaggacaagttcatcatcagcagggacaacgccaagaacaccctgtacctgcagatgagcaaggtgaggagcgaggacaccgccctgtactactgcgccaggaggtacgacgccatggactactggggccagggcaccagcgtgaccgtgagcagcgccagcaccggcggcggcggcagcggcggcggcggcagcggcggcggcggcagcggcggcggcggcagcgacatcgtgctgacccagagccccgccagcctggccgtgagccagggccagagggccaccatcagctgcagggccagcgagagcgtggacgactacggcatcagcttcatgaactggttccagcagaagcccggccagccccccaagctgctgatctacgccgcccccaaccagggcagcggcgtgcccgccaggttcagcggcagcggcagcggcaccgacttcagcctgaacatccaccccatggaggaggacgacaccgccacctacttctgccagcagagcaaggacgtgaggtggaccttcggcggcggcaccaagctggagatcaagaggggaggaggtgggtctggaggtggaggatctggtggaggtgggtctggaggaggtgggtctgaggtgcagctggtggagtctggtggtggtcttgttcaacctggtggttctcttcgtctttcttgtgctgcttctggttttaatattaaagatacttatattcattgggttcgtcaagctcctggtaaaggtcttgaatgggttgctcgtatttatcctactaatggttatactcgttatgctgattctgttaaaggtcgttttactatttctgctgatacttctaaaaatactgcttatcttcaaatgaactctcttcgtgctgaagatactgctgtttattattgttctcgttggggtggtgatggtttttatgctatggattattggggtcaaggtactcttgtcaccgtctcctcagctagcaccgggggaggtgggtctggaggtggaggatctggtggaggtgggtctgacatccagatgacccagtctccttcttctctttctgcttctgttggtgatcgtgttactattacttgtcgtgcttctcaagatgttaatactgctgttgcttggtatcaacaaaaacctggtaaagctcctaaacttcttatttattctgcttcttttctttattctggtgttccttctcgtttttctggttctcgttctggtactgattttactcttactatttcttctcttcaacctgaagattttgctacttattattgtcaacaacattatactactcctcctacttttggtcaaggtaccaaggtggagatcaaacgtacgtctagagggccccatcatcaccatcaccat

SEQ ID NO: 318 - DNA, 1629 bp, Artificial Sequence
  Description of Artificial Sequence: Synthetic polynucleotide
atggacttcggcctgatcttcttcatcgtggccctgctgaagggcgtgcagtgcgacatcgtgctgacccagagccccgccagcctggccgtgagccagggccagagggccaccatcagctgcagggccagcgagagcgtggacgactacggcatcagcttcatgaactggttccagcagaagcccggccagccccccaagctgctgatctacgccgcccccaaccagggcagcggcgtgcccgccaggttcagcggcagcggcagcggcaccgacttcagcctgaacatccaccccatggaggaggacgacaccgccacctacttctgccagcagagcaaggacgtgaggtggaccttcggcggcggcaccaagctggagatcaagaggggcggcggcggcagcggcggcggcggcagcggcggcggcggcagcggcggcggcggcagcgaggtgaagctggtggagagcggcggcggcctggtgcagcccggcggcagcctgaagctgagctgcgccgccagcggcttcgacttcagcaggtactggatgagctgggtgaggcaggcccccggcaagggcctggagtggatcggcgagatcaacctggacagcagcaccatcaactacacccccagcctgaaggacaagttcatcatcagcagggacaacgccaagaacaccctgtacctgcagatgagcaaggtgaggagcgaggacaccgccctgtactactgcgccaggaggtacgacgccatggactactggggccagggcaccagcgtgaccgtgagcagcggaggaggtgggtctggaggtggaggatctggtggaggtgggtctggaggaggtgggtctgaggtgcagctggtggagtctggtggtggtcttgttcaacctggtggttctcttcgtctttcttgtgctgcttctggttttaatattaaagatacttatattcattgggttcgtcaagctcctggtaaaggtcttgaatgggttgctcgtatttatcctactaatggttatactcgttatgctgattctgttaaaggtcgttttactatttctgctgatacttctaaaaatactgcttatcttcaaatgaactctcttcgtgctgaagatactgctgtttattattgttctcgttggggtggtgatggtttttatgctatggattattggggtcaaggtactcttgtcaccgtctcctcagctagcaccgggggaggtgggtctggaggtggaggatctggtggaggtgggtctgacatccagatgacccagtctccttcttctctttctgcttctgttggtgatcgtgttactattacttgtcgtgcttctcaagatgttaatactgctgttgcttggtatcaacaaaaacctggtaaagctcctaaacttcttatttattctgcttcttttctttattctggtgttccttctcgtttttctggttctcgttctggtactgattttactcttactatttcttctcttcaacctgaagattttgctacttattattgtcaacaacattatactactcctcctacttttggtcaaggtaccaaggtggagatcaaacgtacgtctagagggccccatcatcaccatcaccat

SEQ ID NO: 319 - protein, 6 aa, Artificial Sequence
  Description of Artificial Sequence: Synthetic 6xHis tag
HHHHHH

SEQ ID NO: 320 - protein, 5 aa, Artificial Sequence
  Description of Artificial Sequence: Synthetic peptide
GGGGS

SEQ ID NO: 321 - protein, 20 aa, Artificial Sequence
  Description of Artificial Sequence: Synthetic peptide
GGGGSGGGGSGGGGSGGGGS

What is claimed is:

1. A cell comprising a constitutive expression construct encoding a fusion protein comprising (a) an antigen-binding protein or fragment that binds a tumor antigen; and (b) an anti-idiotype antibody or fragment, or an anti-idiotype peptide, that binds an antigen binding domain of a cellular therapeutic, antibody, or antibody-drug conjugate.

2. (canceled)

3. The cell of claim 1, wherein the tumor antigen is MART-1/MelanA (MART-I), gp100 (Pmel 17), tyrosinase, TRP-1, TRP-2, MAGE-1, MAGE-3, BAGE, GAGE-1, GAGE-2, p15, CEA, p53, Ras, HER-2/neu, BCR-ABL, E2A-PRL, H4-RET, IGH-IGK, MYL-RAR, Epstein Barr virus antigens EBVA, human papillomavirus (HPV) antigen E6 or E7, TSP-180, MAGE-4, MAGE-5, MAGE-6, RAGE, NY-ESO, erbB, p185erbB2, p180erbB-3, c-met, nm-23H1, PSA, TAG-72, CA 19-9, CA 72-4, CAM 17.1, NuMa, K-ras, beta-Catenin, CDK4, Mum-1, p 15, p 16, 43-9F, 5T4, 791Tgp72, alpha-fetoprotein, beta-HCG, BCA225, BTAA, CA 125, CA 15-3\CA 27.29\BCAA, CA 195, CA 242, CA-50, CAM43, CD68\P1, CO-029, FGF-5, G250, Ga733\EpCAM, HTgp-175, M344, MA-50, MG7-Ag, MOV18, NB/70K, NY-CO-1, RCAS1, SDCCAG16, TA-90\Mac-2 binding protein\cyclophilin C-associated protein, TAAL6, TAG72, TLP, MUC16, IL13Ra2, FRa, VEGFR2, Lewis Y, FAP, EphA2, CEACAMS, EGFR, CA6, CA9, GPNMB, EGP1, FOLR1, endothelial receptor, STEAP1, SLC44A4, Nectin-4, AGS-16, guanalyl cyclase C, MUC-1, CFC1B, integrin alpha 3 chain (of a3b1, a laminin receptor chain), TPS, CD19, CD20, CD22, CD30, CD72, CD180, CD171 (L1CAM), CD123, CD133, CD138, CD37, CD70, CD79a, CD79b, CD56, CD74, CD166, CD71, CLL-1/CLEC12A, ROR1, Glypican 3 (GPC3), Mesothelin, CD33/IL3Ra, c-Met, PSCA, PSMA, Glycolipid F77, EGFRvIII, BCMA, GD-2, MY-ESO-1, or MAGE A3.

4. The cell of claim 1, wherein the antigen-binding protein is a Type III fibronectin domain, a CD19 variant, a B cell specific marker variant, or an antibody or fragment (e.g., scFv, Fv, or VHH).

5. The cell of claim 1, wherein the anti-idiotype antibody or fragment, or the anti-idiotype peptide, binds an anti-CD19, anti-CD20, anti-CD21, anti-CD22, anti-CD24, anti-CD79a, anti-CD79b, anti-ROR1, or anti-BCMA antibody or fragment thereof.

6. (canceled)

7. The cell of claim 1, wherein the cellular therapeutic is a CAR-T cell, CAR-NK cell, TCR-T cell, TIL cell, allogenic NK cell, or autologous NK cell.

8. The cell of claim 1, wherein the fusion protein comprises the antigen-binding protein or fragment at the N-terminus and the anti-idiotype antibody or fragment, or the anti-idiotype peptide, at the C-terminus.

9. The cell of claim 1, wherein the fusion protein comprises the antigen-binding protein or fragment at the C-terminus and the anti-idiotype antibody or fragment, or the anti-idiotype peptide, at the N-terminus.

10.-24. (canceled)

25. A cell comprising (i) an antigen binding receptor comprising an antigen-binding domain that binds a first tumor antigen, a transmembrane domain, and a cytosolic signaling domain, and (ii) an inducible expression construct encoding a fusion protein comprising (a) an antigen-binding protein or fragment that binds a second tumor antigen; and (b) an anti-idiotype antibody or fragment, or the anti-idiotype peptide, that binds an antigen binding domain of a cellular therapeutic, antibody, or antibody-drug conjugate.

26.-50. (canceled)

51. A fusion protein comprising (a) an antigen-binding protein or fragment that binds a tumor antigen; and (b) an anti-idiotype antibody or fragment, or an anti-idiotype peptide, that binds an antigen binding domain of a cellular therapeutic, antibody, or antibody-drug conjugate.

52.-87. (canceled)

88. A method of treating a subject having a tumor, comprising administering to the subject the cell of claim 1.

89. The method of claim 88, wherein the tumor expresses the tumor antigen.

90. The method of claim 88, wherein the tumor does not express CD19.

91. The method of claim 88, wherein the fusion protein binds to the tumor antigen.

92. The method of claim 88, further comprising administering a CAR-T cell to the subject, wherein the CAR-T cell is bound by the anti-idiotype antibody or fragment, or the anti-idiotype peptide, of the fusion protein.

93. (canceled)

94. A method of treating a subject having a tumor, comprising administering to the subject the cell of claim 25.

95.-102. (canceled)

103. A method of treating a subject having a tumor, comprising administering to the subject the fusion protein of claim 51.

104. The method of claim 103, wherein the tumor expresses the tumor antigen.

105. The method of claim 103, wherein the tumor does not express CD19.

106. The method of claim 103, wherein upon administration, the fusion protein binds to the tumor antigen.

107. The method of claim 103, further comprising administering a CAR-T cell to the subject, wherein the CAR-T cell is bound by the anti-idiotype antibody or fragment, or the anti-idiotype peptide, of the fusion protein.

108. (canceled)
